United States Patent Application Publication US 2024/0065297 A1 - sequence listing, part 2

SEQ ID NO: 3 - DNA, 1631467 bp, Pichia kluyveri
  >Nicaragua_Y298_000002F_chromosome
cttcactatacccccctgcgacctacttcactataccccccctgcgacctacttcactataccccccctgcgacctacttcactataccccccctgcgacctacttcactataccccccctgcgacctacttcactataccccccctgcgacctacttcactataccccccctgcgacctacttcactataccccccctgcgacctacttcactataccccccctgcgacctacttcactataccccccctgcgacctacttcactatacccccctgcgacctacttcactataccccccctgcgacctacttcactataccccccctgcgacctacttcactataccccccctgcgacctacttcactatacccccctgcgacctacttcactatacccccctgcgacctacttcactataccccccctgcgacctacttcactatacccccctacttcactataccccccctgcgacctacttcactataccccccctgcgacctacttcactataccccccctgcgacctacttcactataccccccctgcgaccccccctgcgacctacttcactataccccccctgcgacctacttcactataccccccctgcgacctacttcactatacccccctgccacctacttcacaccgacactacttcactataccccccctgcgacctacttcactataccccccctgcgacctacttcactataccccccctgcgacctacttcactataccccccctgcgacctacttcactataccccccctgcgacctacttcactatacccccccctgcgacctacttcactatacccccctgcgacctacttcactataccccccctgcgacctacttcactataccccccctgcgacctacttcactataccccccctgcgacctacttcactataccccccctgcttcactataccccccctgcgacctacttcactataccccccctgcgacctacttcactataccccccctgcgacctacttcactataccccccctgccacctacttcactataccccccctgcgacctacttcactataccccccctgcgacctacttcactataccccccctgcgacctacttcactatacccccctgcgacctacttcactataccccccctgcgacctacttcactataccccccctgcgacctacttcactatacccccctgcgacctacttcactatacccccccctgcgacctacttcactataccccccctgcgacctacttcactataccccccctgcgacctacttcactataccccccctgcgacctacttcactacttcactataccccccctgcgacctacttcactataccccccctgcgacctacttcactataccccccctgcgacctacttcactataccccccctgcgacctacttctacttcactataccccccctgcgacctacttcactataccccccctgcgacctacttcactataccccccctgcgacctacttcactatacccccctgcgacctacttcactataccccccctacttcactataccccccctgcgacctacttcactataccccccctgcgaccccccctgcgacctacttcactataccccccctgcgacctacttcactataccccccctgcgacctacttcactataccccccctgcgacctacttcactatacccccctgcgacctacttcacttcactataccccccctgcgacctacttcactataccccccctgcgacctacttcactataccccccctgcgacctacttcactataccccccctgcgacctacttcactatacccccctgcgacctacttcactataccccccctgcgacctacttcactataccccccctgcgacctacttcactatacccccccctgcgacctacttcactatacccccctgagacctacttcactataccccccctgcgacctacttcactatacccccctgcgacctacttcactacttcactacttcacttcactatacccccctgcgatctacttcactatacccccctgcgacctacttcactatacccccagcgacctacttcactataccccccctacagtgcagacaccccaatatatagaagataagaaaaatttgaaaaaaaattgaaaaaagtgcggataaggataaggaaaaaattgaaaaaaaatggggaaaaaaaagtttgccgcgagcacttaattttcctaaacaggcaattttgccaaaaagggttaagtaattgaaaaacagtcacacagtagtgtgcggtgtggtgacgtataccctaaaatattacgtaagcataaaatttttaagatgggcaatgtcacacagagaacaaagttgattaaatttatttcaaaaaaaatattacgtaatcagaccctaatctctaccctctacacagtgtaaaaaaattaccttacaaaaaaatattacgtaagcgaaaagtggcagcagctggaaaaaatagccgagccgaggggtggtgtccgcggccgaaaaacaaaaatagccgagcaaggtctactttttccaaaatgctttaaccaactatggattcagacactcgtacacagtgaagtggggatataattttttttagtgtttctgtctatgggaacatgttctcctgtattttttatacatagtatgagtggaaaaagaaaagaaaataagccgtagagggagtaacagccagagataagaaaatcagataagcattttcggacttcggagtagctatctcgacaacgagccgcctttctggcattgttaaacctgttacaccataagtggaccctgacaatgcacccatgcattagaaagaagccaaaaggggtctactaaagaacatagtaattaacactaaaacagtaaaatgacatcatcccgtatctccacaaccagacaatatttccactatgtaaaatttatttaccatacaactgactatggagaacacatacaagctttaaaaagcaagaaattagctgtggtacataatagccatgatttggcggctcagctctttacgacagatttcagtgttgctcacttaggggggtgtatctcgacaaccagaccacttacagactaaccacttacatagttttgttcgccgtgtcaaactgagtcagaccagcaacagcacagccaattatcttctgacattttacaaaagttatttttgaaaatacaatattttgacaaaaagtcaagtaagacatgaaaaaataaaaaataaatacttcgcactactaaaatttccattcggttgaaaaaaaacgagaaggacctgtaaaaaaaaaccgaatgtcaaaacgagatggcccgcgctagaaaaacaaaaatcataactacgtccattccgtccgttttcttagtgtttttccattatacactatatggtgatttatcatttcttactgtttaatacccagtaatcgttaaactgcaaacctttttgtattagctaaataaaattttattactaaattcaaatactgcttggattggcatacactcattaattcattatcaattaatatacaatttgcaattgaaattaaaaattaattagaacatcatgttagattattatgataatacttgttttagtagtatgatacccattccaatgaataacaataataatatattagttcaaatcatatctggagaaacttatcatcactcatactagtaccttctgtaatgtatattcaatagacagtcaatacttaataaaaaaccaatattcactaagaagaaaactctgttaattaatgcatgttggaaatatttactgtgtgagggaagttctcttaataaatttgatggtttattaataactccttctttatcgattattatctttaaatggtaatataatgcaatatgatgctggtttcacactgcttgtttctaatcaataagatgaagaattaatttgtttcaaaaataaccaacaaaaatgaatgatttacctgttagatcttagtttatacgaacatctattttgaaaactacaacaattaatcaattaatcaattatagaaacgaacagtatttactaggaaagacacaatggatacacttgtttgttttaataggaaacataaactatacttgataattcacttatcatcatttaagtaaaagactaatatcttatttgtgaacctccaaataactataaatgattcaatttactctttatgaatatcgtttattgttttttgttaaatgtttatactattaaacaacaccacatcaaaaagattcaaatttacagtatcaaaattacaataattgcaatcaaattatgaaatactactgttataatgactatttaaatactttgttgagtgtgttataatttcacatttttaggagaatatcatgttgtgtgtgaaactaataaatctgatctactacctaaataaaattcaataagttttattatcaaatcaattaaaaccattaatatttattattcatattattaactgataatatattaattttatatgcagtacactttatgcttttgaaacctgaataacagggataaccatgctcaattacaatatattgaaaatgaaattaatttaagaatagtgctttattacttacagaatttaattatacaatcaatttactttgcttttttatgaaatacttgacaaaaccattcatttgaagcactacgattacttagttatcatgaatgaattataaacaatctttacattaatttgcttaattcagatgtctactctaggtttattcatccatttatcaatagctttacattgaatttgaatcaaatgatgaatttttcaatgaaatgcttgagcaaaataaaataactttggatagcttaatttatcagccattaaagtaacactattataaaaatcaatttaactactgttagcaaaatgaaattatttccaatcaataaatttacttagtacaaaaaattgccaacacaatcagaacacaagaaataataaccagctggtaataatgatgcaactatctttcttaagctattaaaagttaatctgaaatattgcaatgcttcaataactgaattaaataatgcatcctatgaatcttcattattgtttatcaaaattaaattaaatgttgttgatgatttgccatcatatgtcaattgtatcatatttctgaaattgttgaataattactcatctatgttcaagtgttgttcttttacaaactgattcataatatctaaacaatacaaaatgatgaatatttcattataagatataatttatcaaatcaatatccatcatttcacagattcattacatgatgtgcttaatatacaacctcaaactaaatcaattaaagatttgcaaatctaatattaataaaaataaaatggttcacttacttatttttttactaatcttaatgttcaatttcgaaattacatttgtttctattaacatctcaacaaattataaatctgttatagaatgacatactgtttctgcatttttacctttgcaaacagccaatgctaaataaactgaaaataatgggaattttaaaacgtcttttaacctttcatctatatcataatcaaacttgtcattcatccacctgtctaataaaaccactttagctgcatcttcgtaactggtacagagttgtgtaaaatgatatccaaaacatctattacacatcatcctttgaacgtatatttcacattttaaaagtgttttaatggatgatgaatcatgaccatacgtatctttaaaatatttgaatggttcaccgtttattgaccttctttttttgtcaactaattctttccattcttctcctttacaaatttccacatctttaatatttttagaaaataataacttataaatcaaatttgtaactgtgttgaacttttcataatttttcaatgctgttctcaaataaaaagaatcatcttcaaggtacagtttttccaatttccttgctcctgttacatttaaaatgaaaacagagtaaaaaactaataatttatcgattttttcttcttcatcatatgaaccatcaaggtgacgtgttaaatgagtttttagctcaccaaaagataatataaatagaggatcgtggtgaactctttttgctaaatgtctatacttttttggaaattttacttcatcaaaaccattatatatctcttctttaaatgtgggatgataggaacgtctaagctttcttaataacacaattccgtctttttttaataccgatttaggtggttcattcattgaaagggaacttagttacatactgaaccaaaaagaagataataagtttcattgtaaattatggaagataacaaattcaacgtttgtaatgtaaaatattacgtaaaacaaaagtacaagattatatacagaaagaatacactatttatacaagacaatggcacaagacgttaacaatcacttgttaccaaacatacaatgatacaagtactgaaaagttagcattcaatacaattcccatttggaatatacaaaagtgcaagaagaattgattaaatgagctcccctttttatagtctttcttccatttaaaacatctcaatcaatggttcagtaattatttgtttaagttttttaataaatctataatcaacaaaacggttacaacagttttcatgtctattgtgagtaatattataaaactttttgacttcttatgtacgacatataaaacttttattaaatattccttggagtttgataaaattcaaaatttgtataaaaaattcaatcttggtattatattcatatataacataacaatttgtatatagggtatttgaaaatcactaacataatattttgttgtaatcaatgcacgtttggtaggatcattttgaaatttatttatgacaaagttttattatcttcaaaaaataaaaaagaacaatctgaattaactaatgacttaaagttataatatagttcatgaagtttatctttattatcactgatgacaacagttttccctcttgaatgggaaaaaaatcaaattagtatatttgttatgtcatcttctataatactatcaccatcagtattcatatgcttaatttgtattctatttttataagaaaattcattaattatggacattatcttaatttcattatttaacctgaaaagtttgcgtaaactttgtgttgtgtctgtattcataatatgagacatcatcaatattctagagattctattaaaattgaattctttgaaggattctataatttttggattaaacttatcttttagaagagtattgggatttgtaacagattgataaaaacctataaacatcaaatttcttttcaattaaaaacatcgattgatcatttccctctatatcaccaacggtaaatccgtgtaatactaaaattgatttgaaattatcttttgaaacagtgtaaggaagtaaaattatattaattaatcatagctttaaaaaatgatatcaaaataatcatattagtatctaatgatgttgattgaatataatactcgtcaaccttatttgcaatcgtttgaggtattttgatttctatttcactaaatgatgaatttgggaaaacagtttgttttatttccattgataaattaaaatatggaatattaattttatggtatgattgatcatatataatttcagctaatcatgtaagttcaggtacataatgagcaaaaaaaggcaaagtataaccatttgcatctgtccagggagatattagataaacatttcaattagttttgaagtagaaaatgttgaatcaattaggaaatactcatctccccttgcaacatgatcactgacagttttaataccatattcaactagtaaaggacatgcatgcactagtactctatcattgtacttggttaatttaaattttcaggaattttaggatcatatggattcatgaatactttgttggtcaaatccacagctatatcagtacttgtttgatgtacattcgtaactatagatcttattaaaaatcatgtcaagcattaaagaattgccattcattgatgatataccctctttaataacacattcattgaaaaattgataaacagttgaacattaaaaaccttttggtttaattaattcgacatctttaacagcataatttctccttggttcagtttcaccaggtttagtatctaaagtgtgcttgagaaagagtaaagttcactaaatgttgtctatagaatgtattcctgtctattgaacatacatgtcatgtcctttactgttttaaagcatataagcgatgttgcgattattatataatttgtatttcataagatatccgaaaaatgggtacttttttgaaaatgcttttcactttcaggaaatgttataatttatcattaagatatacaatatagttataaaaataattatttcttttcatcatcaagaggataaacagttggatcccaacaagtaatcaaagattcatcaatattatcaagagttgcaagatcttcgtcacttaattgaaatgaagtagcttctaaattaggaactaatcttgatggtgtaacagttttaggtaaaacaatataacctttacttaatgaccaattaagtaaaatttgtgctggagttttattatatttctttgataatgaaactaaatgtttatcatccatctttttacctctaactaatggagaataagcttcaattttaatatcatgttctttacaatattcagctatatcgtttcttggtaaccatggatgaatttcaacttgattaacagctggtttaatagttaaatctgaataagctaataattcctttaaatgtttaacaccataattagatacaccaatatttttaactaaacctgatttaacagcttcttgaagtgcaatccatgaaccatgtcttttttcataattagattgtggtgaatgcattaaaatcaaatcaatataaccaatatcttttgctttttctaatgaagcattaattgcctttttagttaattcatatccatgattatcatcataaattttggttgtaaagaaaatatcctctctcttattctttgatggatcttccttaatccatttagagataccttcacaaacttcatgttcattttcataatattgtgcactatcaatatgtctataaccagcctttaaagcttcaatggtaatattttctgtaacattaggaggagttaaataaacacctaaaccaacagctggaattgtatttcctgagtttaatttgataatttcagagatcatttttacaagtttgtttgttatttgatataaaacaaaaataataaaaccaaaaaataagtaatcatgcattccttttatattccaaatatttaagtaacatagtggttataataatcaaagggaaatacctttttaggaaactcatcggtgatgatttgtaatcaacagtatttcctatttccaatggcagatattactgttggtttcttattagtatacgtatgtgtaacaagtcccgtaactatactaatcaaccatttctgatagttaaatgaataagtgaaagtgtttgggctttgttaaggtcacattattaatataattctttggttatcatgtactctgaagaatagaggtattatatagtgtatagtatagttatgattatctaaaggaatctggaataagctcgatggcaattctctggtttctgtcacagatatcccaatgatgtagaatagcctttggacgttcatggaactgctaaatatttactatatatatatatatgtgtgttgttgtgtgttattttgccttcgggatcatattacatttaactttatttaacaactattcattaggttatcatatacaacatattagataaataagtttccttgttaatcttgttgtcttttatattatttattgattattatacattttatattacttaattaattaatctactctttaaaatgtccaacaaaaatccctcaatttctaacacggggttactattgggtaacttagtttagatgttgttatacaaagaaataaagaaataaagtaaagtaaagtacttaatcataatcataatcaatattgaaaaccgcaagttccgagaaattggaaattggaaatttgaaatttttcttatcagcctttatcgtttttcccaattgggaatatgcgataagatcggtggttattatttagaggtattggttggaatatctatttctatttgaagttattatatggatgataataagtataaaaggtcttgattatccagattattcaaaggtttttgttcattcttttcttttatttaattaaataacaaaacacaaaaacacacaaacacataataaattagaaaaatgcctgatattgtctttgatattgttggaacttgtatctcttatgaaaaagttattgatgctattacccttagacttggtgatagatttaaggaatctggtattgatccacgtttatttttcttcttttggcttgctggttgtgaacgtgattattcttatttatctcaatgtaaacattatcaaaaatttggtgatattttcaaatatactttctatagatcattattctttgctggtattaaggaaccaagaacttatgctaatgatgatgatttagaatttatttatggtgaatggtttaaacttgaaggtagacctgaattaaaggaaatgtttaaacgtttaagagattatggtttcactatttggtgtttgactgatgcatctcatgatagagttgcaggttattttaaacgttcaggtgttgatatgcctgatgaaaatttaatttcatgtgattcaattggtgttggtaaacctgaagctaaagtttatgaatttattgcaaataaaattccttcatctggtaatgatgctttctttgcagcttctcatatgtgggattcaattgctgctaaacaaggtggttttattactgcttggtcaagtgttcatgagaaggaaccttgtaccgaagtttttggctctcctgatattattgctactggtttagttgatatggcagataaaattattgctaagcataaagaattaaatgctgcttaattgtttatttatttaattgtttttaatttatttaatcaatattcatttatataactaaaaaaaaagtattttcatttgtttaattattttaattcactaaaacgatcatttatttattaaaattgtcatctttttatttataatttacttatttttcatttgaaactagaaataatgattaaatttaaataaaatctataagtagaaaaaataatgttataaaataaatgttacttaaaagctataattttgattttggaatagttcctaacatctctaataaattgtttttagtattttccattctatctttagtaattttaaatgctgaaggaatatcaagtgagtcagaacttccattaattactttagctaatgcctttgctgataataaaactcttggcataccatgaccatgaaatcctgcaatgacaaacttattcttttcttctaacatttctccaacatatggaacggtatcatctgaataacctaaaattccactccaaacataatcagttgtagctttaaaatctttccaagtataaaacattttcttcatataatcatcaaaatattcctttgtaccttcaattaatgtactatcatcaacattattataaaaaacttctttaaatgggaaaatatgttttttagcaccaccaacaataactgatccatcaggtctattgattaaataatctgtatctgcacctttatatctaataccataagtattagttaaatgtggagttctaatttttggatctgatgaaataatatgactacatgcacctttaattggaacaattttattttcaaattttggttcaattgctgctgtatatccattagttgcataaataactttttcagtgataactttacctcttgatgtttccactaaatatttaccattctctaatctatcaacttttaaaacaggtgtatttgtttgtaaatttaaacctttagaaacaacttttttcaaaagtgcagtcataagtttataaggccataattgacctgctgtataagttaaacaaactgatgagtcttcaactttagaaattaccttagctgcttctccaaatgtaatttgaacatcatccttacaagtaacataaggattttttatcatttcataataattttcaattgaacttttacctgattgggaacttaaatgaacatcacatgctctagttaaaacaaaatcacaatcaattttttccttttcaacaacttctttaacagcttttaaatgtgaatgttcaaaattaataatttcagcagcacctttttcaccatatttagatttaaaatatttatattgactatataaatcaggttttaaatgaccgccattacgtgcagttgcaccactacaaacgtttcttgcctctaacattaaaattgattttttggcagttttatcattctcatatagataataagctaatgttgaacctgcataaccagaacctataattataatatcagtttcttgtggtaattctcctttagtacgataagttgcaaattcatcttcagcagttagccaaaatgatttaattggattgttaactggtagttctgttttcattgttgattgaattgactgaaaagatccaatcaagagggatgttccattaacttggtcgtatcaatcaattaataaattgtatttatgaatatatttcatgattgattataatttaaacagtaaccatttgtagaatatgcgacccatgatgtaatctgacctaattgagaatatccgctggaaaagtaactcatcaatggacatgataaggtacagttttgataagataagaaatctactgataagaaaatttgggaatttcccttttgggattatgcgacactattatcccactgtcttatcaaacttaagggttccattgggaacctgtttcggaatatgcgattatcgacagtatttatcatggtttccaatatttatagatagttgatcgttttccgataacatacccctttatcgattacagtttatgatctgacggtatttaaaaggtgatcagatactccattaagacgatattatcattctatttttttaaaatctgatcatattttataaaacaaagaaaaacaattattaaatgttagataaagaagaaaatattattgaatcaaataattcaactagctcaaatgagaaacaacatgtcgatgttactgttgaatcattagaaaatggtgatgattttgaagaaagagaaattcgtgataaagcttataaaattttaaaaggtcatattgatgaagcaattactcctgaagaaaataaaagagttagaagaaaaattgattggagaattttacctttaattacattagtttatggtatgaattatgttgataaagcagcattatcatgggctgttatgtttaatttaagaaaagatattaatattgatggtaatcaatattcttgggtttctgcaattttctattttggttatttaggtgctgaatatcctgcaaattttattattcataaattttcagtttctaaaattatttgtgttgtttgtttagtttggggggttttacttttcggtcatttaggtgttaaaaattatgctggtttaatggttattagatttatacttggtgtttcagaagctccaatttcagctgcttgtattaattatattggtgaatggtatacaaaggatgaacaaccatttagatttttatgttttgcatcaggtcaaggtggtttatatattatattttcattagttgcatatggtttaggacatgttaatgatggttcattatattcatggcaatatattttccttgttttagcatgtttaagtattattttaggtacttatatgtggttctttttaccaacacttccaagtgaagcaaaatttttaactgaacatgaaagattaattgcaacaaagagagttgcaggtaatatgacaggtattaaaacaatttattgggataataaacaaattattgaagcaattaaagatcctaaaacttatttcttagttttatatatgtttttcagtatgattccaaatggtggtttaacaaattttaatacattagttctttcatcatttaattttagtaaatatgaaacaattttagttaatttaccatggtcattcttctctgctggtcaaatgtgggtttgggcattttttggtatttattttaaaaatttaagaattttaggtttaacaattccaatgattattgcaatgattggtttagcaattgtttatggtacagaaaatggaaatgcagataaatggggtagagttttcgcatattggatgattaattcatgtagtgcatcattcccttatgcaatgaatatgacaggtcaattaattagtggtcatacaaagcaatcatttacaaatagtgcagttttaattgcatttgcagttggtaatattgttggtcctttctgttttaatgcaagtgatgcaccaagatatactcatgcattagcaacaattatgggttgttttgcagcatgtattgtaattggtggtggtttaggtatttatattttatgggaaaataaaagaagaaataaattatatggtaatcctgaagaagatgaatctttaaaacttgaaggtattattgaaggtttaaaggataaaactgatactgaaaatcatcatttcagatatgtttattagtttagtatttaaattttttgtatttctttagctattaagattgattctattattaaattttgagactagtacttacagataaaactaaataataaattataataagtaaaacaaagaattccaacttttaaaaacatttctgtttgtattttgtaaactttaagttattttataatttatttaaataataaaaaattaaatcctttttcaaactctttaaattacaacattaagccatctaatcaaacaactattaagttctttaatgtaagaaaagttaagttttatgtaatctactgagaatagtgaacttacttttggaaaataaaaatattattgaaatagttaattattcaaaaaaaaagatgattgtaagtaaaaaaaaatattaatttaacttctttattaaaacaaatatataatatttttaccatataaatcataaataaggtgttttaacaggtatatttactaattaaaccttgtaaatcgtttaaaagactgttcggctcagatttttttttttttttttacattaatttcattaaaatatacaattttatacagattgattacttatacgcatatattattaatgcttcatcaattcaatatatcttcatatactgaactaaatgtaaattatttctgtttgattattctcaatctttttcatctaatttagatctaataagaactaaatttttcatatttgaatagcaaatatgtatctttaatatatctttttgttatcctaaactctggatcattcttattgcttttgtagcattgtttgttaaaaaatataattaacttgattattatatttgctttataagcatctttctttgttgatattaaaccaacaatattttttagatcaatttttatttctaattcttttagaattatttcaattcctttacagttgaaaaagacatgatgagtcccaccttccccttcgcagaattggcaagggtgataaaaatgggaattcaacattcctgtttgtaattcaaataattcattaaaatcaacatggttttgattggtgattctacccaaccaacccacgtgacttttttaaaggagcggcggaaaaaagcaaagcgtttcaaaaattgtagtaggcaatttgtccgagtggttaaggagaaagattagaaatcttttgggctttgcccgcgcaggttcgaatcctgcagttgtcgattaaaacgtttattttttgtaaaatttttaagtctctttttcaacatgaatatttcaacatcagaaatgatgaaaaatcaatgcattgctttataattgaaagttaatttaggataatctttttttttttttcaactaagtagtatataatataggataaaccatttaaggaagaaaatataataatgtcagttaatttatcatcattagaaccacaacaattaatggcatttaaacaaaatactaatcaagaattattacatttagaatcatcatatgaagcattaattttagcaacaaataaatataaagattgtattaaaagtgttaaagaaataaataatgattcaaaagataatgaaatgtttataccattaacatcatcattatatattaaaggtaataataaagttaataaatttaaaattgatattggtacaggatattttattgaaaaggatgaagatgaatcaattaaatttttcaataagagaattgaaaaattaaatggtgattcaattaaattaaatcaattaattaatgaaaaggtaaatttattaaatagtatagataatataattagagagaaagttattgcagcaaatgctaataaagctgcaaatactgaggcttagaatgagttattaactaggcaatatgtaaacattgattaagtttccaattatccaatcaagatataacaataaataaataaatacactgtataataataataataataataaacaaaaacataatacagtttcggcgaaaacgccgagaagcagtggagtggtgtgcggcattttcaccgaagacaatctattttcaaagtcttttctcatagtaattttctgttggcactataacagtgtacacacaatctcggttattttgccgggaatgttgcttacctccccacttcggtgaactcaattgaccaattagagctatgttttatattctattctattccaagataacacgttgccctttccgtaatgcatctagacttccccaacaattttcttttatatttgtctataaataccagtgtatatttccatattataacccattcttctcttttttattctttcttttaataacaaacaacaatgacatctttcacaccaaagattaaagttaatactgatagaatcacatatagtgaaacagaattaacaactaaatacacttatgaaaattcaattgtttcaattaataaggaaactaatgaatataatgttgaaaatattgaaactgatttaacatttaaagttgatttaaaagttcctaaagttggtgttttattagttggattaggtggtaataatggtacaacatttacagctgcaacaattgccaatagagaaaaaattaaatttcaaacacgtgaaggtgaaattgaatcaaattattttggatcagttacacaatcatcaacaattaaattaggtattgattctaagggtaaagatatttatgtaccatttaattctattttaccaatgattaatccaaatgatttcattatttcaggttgggatattaatgaaatgaatttatatgatgcaatgaatagatcaaaagttttagaatatgatttaagggaaaaattaaaaccttttatggaaaaaattaaaccaatgaaatctatttattatcctgattttattgcattaaatcaagatgatagggcaaataattgttttaatagagaaggtggtaaaggtaaagttgaattaagtaataaatgggaacatgttgaaacaattagaaatgatattaggaatttcaaaattgaaaataatttagataaagtaattgttttatggacagcaaatactgaaagatatagtgaattaattgaaggtgttaatgatacaagtgaaaatttaattaaatcaattaaaaaaggtcataatgaaatttcagcaagtactatatttgcagttgcatcaattttagaaaattcaccatatattaatggatcaccacaaaatacatttgtaccaggattaattgaaatggcaattgaaaaggatattttcattggaggtgatgattttaagagtggacaaacaaaatttaaatcagttatggcacaatatttagttgatgcaggtattaaaattaaatcaattgcatcatataatcatttaggtaataatgatggatataatttatcatcaccaaggcaattcagaagtaaagaaatttccaaagcatcagttgttgatgatgttattgaaagtaatgaaattctttataaaaatgatgaatcaattgatcattgtattgtaattaaatatttagaagcagttggtgatagtaaagttgcaatggatgaatattatagtgaattaatgttaggtggacataatagaatttcaattcataatatttgtgaagattcattattagctacaccattaataattgatttaattattatgactgaatttttaactagaattagagttatgaaagatgataaatatgagaaaatgtatacaattttatcattattaagttattggttaaaagcaccattaacgagaccgggatatgaaccaattaatgcattaaataagcaaagaatggcaattgataattttttaagaattttaattggattaaaaccattagatgaattaagatttgaagagagattgtaagtgtataagaatatataacttaagtattattttttaaaattaaaatgtttcaaaacattcgattattgttttcaaattttctaataaattattaactgtaactctaataactctatcatcaattccattaacaattatatttaaaattgtattatttttaattttatattgtacattaatggtatcaggtttaagcattggatcaggtgataatgatttttgagcaattaaagcatgattgttgttaagaaatgggatattaatagataatgatacaggtaattgggacattgttgattgttttcaggaaaaagaatgtttatttcagttattaaaattattctaaactattcctaattgaaaattttcatgtcatcggagaagtcaatgctcaatcccgagtcacgtgataaaatgaaataaaagcagacgcgacggcataaaaagatattacgtaatcaaataataaaagactggaatcctctactatattaataataatctcttacagttacctaatcggggaaacagaaaataagcgccgaaatttgttaataattgggcggagtttgtaatcagtaccatggtgattaacaattaataatctttaattggccattccctctgattgggagtggtgaattgtataaatagtcttggatatcttattatgtagtcattttaattttaattttaattataattatattctttaaaataacaaaacaaaacaagtactactatgtcaaatccaccagtctacacaacaaccaatggttgtccagtttcagatgctttctcaactcaaagaatttcaattgttaataatgattatactaataaagcaccaattggtcctttacttatgcaagattttaaattaattgattcacttgctcattttgatagagaaagaattcctgaaagagttgttcatgcaaaaggtgctggtgcttatggttattttgaagtaactgatgatattagtgatatctgtgatgctaaatttttaaatcaaattggtaaaaaaactaaaattttcactagattttcaactgttggtggtgaaaaaggttccgctgatactgctagagatccaagaggtttttcaactaaattttatactgaggaaggtaatttagatttagtttataataatactccaattttctttattagagatccaactaaattcccacattttattcatacacaaaagagaaatcctcaaactaatttaaaagatgctaatatgttttgggattatttaactaataatcctgaatctttacatcaagttatgtaccttttctcagagagaggtacacctgcaagtttaagaacaatgaatggttattctggtcatacttataaatggtataattccaaaggtgattggcattatgttcaagttcattttatttcaagacaaggtgttcataatttaaataatgaacaagcaggtaaattagcaggtgataatccagatcatcatacacaagatttatttgatgcaattgaaaagggtgattatccagtttgggattgttatattcaaacaatgacccttgaagaaagtaaaaagcaaccattttcagttttcgatttaactaaaatttggcctcatagtgatttcccattaagacattttggtagatttacacttaatgaaaatccttcaaattattttgcagaagttgaacaagctgcattttcaccttcaaatacaattccttcaatgcaaccatcaaatgatccagttttacaatcaagattattttcatatcctgatactcaaagacatagattaggtgggaatttccatcaaattccaattaattgtccattaaaatcaggttcatttgcaccacaaattagagatggtccaatgtcaattgatggtaatttaggttctacaccaaattatgcaaatgcatataattgtcctgttcaatatacagttcctgctaaggttaatcaagataaaggtaatgatgaaaaataccatgaagaagttgtaccattccattggacaattgatgaaagttacgattttgttcaaccaggtaaattttgggatgttttaggtaaaactaatggagaacaagaagcattagttcataatattgcaagtcatgcaaaggatgcagaaccttttattcaagaaagagttgctgaatattttagtaaggcaaatcctgttattggtaaattaatcaaggaagaattaaagaaattaagtaaattataagttattttattttattttattttattttattttattttattttattttattttattttattttattttattttattttattttattctattttacttatttatttatgctttttgttcattttctatctaattaatacatctaatgatcttatactaataattcatgtaatcaaattctccaccgccataccttcctaaaagagcaaccacccccaataccccaggcggttctaccttccccattaggaaagaagatacgataagcgatttaaattgataagcttagttatatccattattataaagctgaaatgattccctattcatctctttatctcttctcttcatctcattaaacaaacaccatggcttgtaaatgcactcaaagatcagaagagaataagaaattaacagcaagtagtagtagtagtactacttctacttctactactactaagataagttcatgtggtggtttaaaggaaagtgaaaagccaagtagatgttgttgtggtagtggatgcaaatgtcctggttgtaataccactaagttgtaatgtataatactctatactctatactctatactgtatatactctatatcctttataatactaatactctgatactctatgataataccgacgcatagtcctcaaagaccagacatccttacaccttgaagtcctctcagcaaataaaatttcgttaatttccaatttctcatttttttgaggggaaattagatttatttattcaaattataggtttagatatagataaatacttcttattagacaacaatgttatcatctgtacgtagatttacatctaaatcatcatcaaaacttgcatatcgttcatttgcaacacttgattcatcaattccaaatagaattcatggtggtttacaagataaagatagaattttccaaaatttatatttaaaaaattccaaaaaacatggtactcaaccttgggatttgaaaactgctgaaaaaattggtgattggtataaaacaaaggaaattttattaaagggtgataaatggattattgatgaaattaaaaaatcaggtttaagaggtagaggtggtgcaggtttcccatcaggtttaaaatggtcatttatgaatcctccaaattgggagaaaaatgttggtccaagatatgttgcagttaatgcagatgaaggtgaacctggtacttgtaaagatagagaaattattaggaaagaacctcataaattaattgaaggttgtcttgttgcaggtagagcaatgaatgcaactgctgcttatatttatattagaggtgaattttataatgaaactgttattttacaaaatgcaattgatgaagcttataaatttggtaaattaggtaaaaatgcttgtggttcaggttatgattttgatgtttatattcatagaggtatgggtgcatatgtttgtggtgaagaaactgcattaattgaatcaatggaaggtaaagcaggtaaaccaagaatgaaacctccattccctgcaggtgttggattatttggtagaccaacaacagttacaaatgttgaaactgttgcagttgctccaactattttaagaagaggtggtgattggtttaattcatttggtgcagaaagaaattcaggtacaaaattattttgtgtttcaggtcatgttaatgaaccatgtacatttgaagaagaaatgtcagtccctcttaaagatattttagaaaaacattgtggtggtgttaaaggtggttgggataatttattagcagttataccaggtggttcatcaacaccaattttaaatgctgaaacatgtcaagatcaaataatggattttgattcattaagaaatgttggatcaggtttaggtacagcagcagtaattgttatgaataaacaagctgatgttattagaggtatacaaagattattagcattttataaacatgaatcatgtggtcaatgtacaccatgtagggaaggttcaacatatttatcaaagatgatggatagattagcagttggtcaagcaaatgaaaaggaaattgatcaagcattagaattaacttataaagtttgtggtcattcaatttgtgcaatgggtgaagcatttagttggccatatcaaggtttagttaaaaattttaaacctttaatgattgaaagaattaatgaatacaaattacaaaatggattagttaatggtggattaaataatggtggttggtatgaaaattcaagtattaaaaatggtattgttattgataatccaattccaaaggaagctttccatggtcattaaagatgtatgtccctctattctatttatttatttaaagtatactactactatataaaactatataattctccaagattcaataaaatataagatacaattaagcttactgtcttaagactgttcacaataggaaacgtgtataataaataaattatcccgcaatttattgaatttttcattttaaaatagaatatatatatataggtaccttaccaacactgatgtctttattggtggatataggatttcttttctttcttaaggtcagtggacaatgaagtttggtaacctatctgcgtatttattacttgcatcaactgtattggcaatttatccatcaccggaagggatttcaaatgataataaagatttaatttcaattacttcaaatactattaataaaccaaatgaatcaattaataaagaaccacaatatacagatgaaacttcatcagagacactttcatcaccattttattcattttatttatcaatttcaatgattatagttagtgaaattggtgataaaactttcttaattgctgcaattatggcaatgagacatcctcaaatgattgttttctcagctgcttcaagtgcattagttttaatgactgttctttcaggtttaattggtcaattattaccacaaatattatcacctaaattaactagatcagctgcaagtattttatttttaattttcggtattaatttattaagagaaggtttaaatacttctaaagatcaaggtgttgaagatgaactggcagaagttgaagaagaaattgctaatgttgaattaaatgaaatttctaatgatttagagaaagctaatgaaaatattattaaacatacttggacatcaaggattaaaaatttaatttcatatatttcatcaccaatttggtttcaaacattttcaatgactttccttggtgaatggggggatagaagtcaagttacaacaattgcaatggcagcaggtgcaaattggttttcaattatattaggtggttcaattggtcatatattatgtactttattagcagtaatgggtggtcaatatatttcaacaaggattagtttaagaacaattttattaggtggttcatttgctttctttatattttctattttatatggttattctgcattatacgaatcttaaataggttattatattatatatatcactacatacattattcaattaattcttttatacgttgttgtaggagttgatgaaacttttcattttttaatttattaataaatggatatttattattaatatattcatcatattcatttaatggagttgtagataccttctttttactcttttttgatttaattactttattattaatactatcagcaattttattatatttaccaagtaaatcttttgttatatcagttgtggtgggtttattaagatatttatctatattaaatgattttagtatagtatcatcattatcattattatcattaaatattttcttaactaactcaacaggtgttatttgagtgtttgtattgggatcaaagttcctaaattgcattgtgtaaagaaaggaagtggcgtaaaaaaattgttattatatattagataagttattttaactacttctttcttttttttaacaacgatatgaataaaataggtataagaacaggtattagaaacttccattcaagttatcaacttctatcagtcaatggaccaaaatttgatacacaaaaatttattgaagaatttgttaaatgtggtaaatttagtgaagatcaagctaaaagtgcatcaaatataatttctaatagtattaatgatggaattgaattatatgcatcaaatttaattagtagagaagtacttaataaaatgtcatataagcaaaaagttgattttgctaaattaaaaggtgaattacaattaattgataaaagtgattttaattcaattaagaatgagaatgaaagattaagaagtgaattagagaagatgagaattaaatttaaggaggagattaataaaagtttaagtagtgttagattagatttaagtttagagaaaggtagaataagagaggagagtagtatttatgatttaaagattaaagaaacagatacaagaatcaatcaagagatttataatttaaaagttcaaattgatagtgttaaaacaactgttttacaatggttatttggtgtttgtgcaggtacattttcccttgtattagcatatgcaagattagttagttagttatccttttatatacttaattataaattaaaaatttcctttaattgattaattgtatcttcaggagatgtaactgcatgaccaatagttctttcatcagtataaatttcataatcattaccacctttataagatttatcaccaaagaaatgaatattggtaaaattttcaccttctaaatgtcttaaacaataagttttatcccaaccagttgggaaaacatcgaaagaaatttgtccaccaattgaataagttaattctaaatcagagaaattttcctttaatgcattaaccatattaattctaatattatttggtaaatcgaatttttcatattcatttctctcctctgtattacaatttctaccaactggtgaaacattaatcataccttttctaaattcaataaaagtacctcttctgaaaggtaaatctaattcagataaatattttaagataaatttacttaattcattatatttttcttcaccaatccaattaataaaactttgtgaaggtaaaggtttaccaaatttaaatgcagtaagaccattttcagagaaacaataatcgaaattttctaaaacatcaggacctaattgttctaattgtttagcaaaatctgaaccaccaacgaaaccaacagcacatttttttcttaattctttcaacatatttttcatctctggagagatagttaatcttgcaggtgttaaagtaccatcaacatcgaaaagacagatggtttgaggttgttctctatcagcaaaggacatatttacgatacttataagacaatttcaaagaagaagtaccttatataaaagtaaataaacaaatcgtcgacaattgtccatttttataccaacgcgcttttaatttaaagtacataacgtgttataaagctttacctctactattactaacttctgtaatcaccgttgatggtaacatagtcatgacttagatcacatgtccagaactggcattgtccatcacccggtaaccctaaatctatatctatctgtaaatctggtaattctaatatttcactggctctagtttcatcaacaatttgaggttctccattaactaacaatttcaattctttactaccatcagttggtataaatgaaacattagtagtacttggattaacttcaatattactatatccaattgcacataagattctaccccaattagcatctttaccaaacattgcagttttaactaatgcactattggagatggaatttgctgccttttgtgcttctaaatcgtttttggcattcttgatgtttatggtaataaatttagttgcaccttcaccatctctgaccactaatttagctaattcaattgctaattcattataatttttttcaaataattcatataattctaaattaccattttcacttataatttcaccaccactttgaccatttgataatgataaaatagtatcattagttgacatatcaccatcaactgaaatacaattgaaagatttattaactgaattagttaataaattttgtaatgttgaatgttcaattggtgcatcagttataattaatcctaataaagttgccatattaggacaaatcatacctgcacctttaactaaacctgcaatattataagtaatattattatattggaaacttttggaaattaatttagggaaagtatctgttgtcataatacctttagcacaattaagccaatgttcatgattagaatccagttgggtaacaatttgatcaatacccgatttaattttgtccatttgtaatctttgtccaataacacctgttgacattgtaagtgtattcgagatggactcaacattattacctaattttttatcagtataattaataatttccctagcatcatttaatccaccattaccagtaactgcatttgcacaacctgaattaattataattgaattaaaattttgatttaatttagattgtaaattatctctatcaattataacgggagctgccttaaatttatttgtagtgaaaacaccagctgcattacaattatatgatgaataaattaatgataaatcgggattaccattttttttaacttgacaactaactgaaccaactttaaaacatttagggtaagtaccattagttgggatatattttaatttatcctttggaatggtcattgaatagagtctagtaagtctaagcattgttactaagagagaggaataaaagaaggaataaatggacgaaatgaaagtggaaaatgagtcaaaaagtggaaaatataatggaaaatactataataatagaaatagaccctataacaattagccgcgattacccgtttgggacgccgtcgcgtctgcgggtttttccattatatttacttacttaacatgaatattatattataatagtagtagaatataggtaatagacacttcttttagagacacccactatgactagaagcagtaggagactgaggaataatgacatgacagaggatatcactcctactagtgactcttttgttgaaccggagttatcaaatagtgtgattataacaggtcaaaaaatggaagacccaccttcaattaaaattaaaaaagaatttggtgttttaaataagaagaaagtgaataatagtaatgatattgtacaatgttttcaaaattatcagaagaaattacaggatcaacgggaaattgaaaaaaatactaaattaagtattctaagagatagtaaggataataatactagtgatgaaagtgattcatcatcatcttcatcatcttcatcatcttctgaatctgtaccaatacccacattatcattatcaccaaagaaaataatgaagagaaagtatactaagaagacactcccctctacgacgttattagataaaataaataaatcaatgattgatattgaaccggataatatagaggagaatcttcctgtggaagataaccaaccaattaataatgattattgttcatgttgtggtatgacaggtatgtttatttgttgtgaatcatgcccaaaatcttatcattttcaatgtgttttacctccaatcgattcaaataatttacctgattcatggtattgtaaagaatgtatcaaatcaaggaataaaaaaaatataccttcaagtattggaatttatggtaaattatttgataatatattatttcaagatacaatttcatttcaattaccaagggaaataattgaaagtttccaagatttatcatctgataaattaggtgattataatgataattcttttaaaattgttaaatcttataaaacattaattaaagaaatggatgatccaataaatggtatatatgatttaaataatcaaccatatttttgttataaatgtggtgaaagtggtaatagagaaagagaaataattaattgtgattattgttcattatcttggcatttagattgtattgattatgaatttccaatgactaatgttaaaaaattaggttcaaaatggaaatgtccaaatcatgttgataatctgtcaacattaccattaagaaaatttaaaaatcaagaaattttaacagttaataatattaaaaattttgaaaaaattaatggtaaattaccaattaatgcaaatattgaaataattaatatagaggataagttaaagtcattgaaggataaattgaaattgttgaaaaatgataccaatttaagatttaataatattacattccaacttagtgaagaagaaattatacttgattttataaattttaataaaattaagaaaataaatgaaaatgataaatcatttcaattattgatgaatttaaatccaaatttaaaagattatattaaaagtttaagtaaattaagtggtaaaccaataatagacaaacaatatcaacaaattaatttccaaaaattattaaatatatcaaatgatgaaattaaagtaattgataataatctcccgcaagatgaattatctgaattattatcaattaaaagattattagaattaaagggtaaggataaattaattgaatttttaaaatcatagtataatataatataaacctatatagacctatttactacccatttcaatatcagtatcgaaaaatgtatcccttaattcaatccatctagttgtataagtacctaatataataaccaaaattactgtaattaattgtaaaatccaccaataaaaattccaagggaatccattaattaaagatatgataattaaatttaataaatgaattgttaatgcaaaatcccaaactaattttgatctacttataattaatgtaataattaatactgaaataagtgaattaatcaaccataatagaatcaatgttaatccaaaactattctctaatgatatttcttcccatgaaaatattaatttaattgttgattcattccaaccaagtaatatggatgtaatgaagaatattataaatgctgtaaaatagtaaagtatttgtaatattaagatttgaaatgataatttagtactcaaattagaggtattacttggtgataatgaaatgtatctgttatgcagtgatgataatatagtcattatttatagttatgttcgatagcaatggtgttgttataataagaaggtagtaattaattaataaagaaatgtctttttaatgacgcgtgggaattcctctttataaccactttcttctttcttttggacaagctttaatacgtgtttagagtgggtattaaacggtattagaggtattaggagctggtatcagtgaaatagaatacaagtattagtagtataccttttagttagctgaaaatgtcccagaaacttaaatttaatgaagaaatcatttcaacggctgctgagccaatatcttctaaagatttgctactaagattatcaacattacaggaagaattatcaaacatggatcaatcatcaatagatttatcatctcttgaatctattaaagatgatcttataaataaaaaattgttgaaaaatactaatttaggtatacaaatcttagttagttgttgtttatcagatattttaagattatttgcaccaaatgcaccttataataatattaatttattaaatattttcaaattattcataaatcaatttgcttatttaacaaatgtggattcatcttattataataattatatttacttattggagagagtagcagaaattgaattgattgcattattaacagatttagataattgtgaaaaattattattacaattatttgaaactttctataatttatcaaacaatgtcagtaatgatcatttagaatctttaatggttgatatattaggtgaagttataagtgaagttaatcaattagatttgaaaattttaaaattaatacttaataaattcttagttaattctaaaaatttgaaaaatcaatcaaattttaaagtaccaggttttaatattagtttaaaattatgtgaattaaattcagataaaatgtcaagattaattacttattttttctcagaaatgatcttacaagcaacaaatgataatgataatgatattagtagtgatagtgatagtgatgatgaaaataagtcatcctcaaaaaagggtacaatagacatcatacaattaaagaaaatacataatttagcaatagaattatggagatatgttccagaagttttaacttcagtattaggtttattagataatgaattagaggcagaagatttaataattagatcaactgcaactgatacagtttccaatattttatcaatctatccatcaagaattaatttctcatccacttacactgaaacttatatgaattggttgaaaaaacctttagatatatcatttgaaattagaatttgttggttaaatggaatttctaaaattttagaaaatagaaatgatttatcaaatgatttaattaatggaattttgaaaactttaatggattcaaatgaaaaagttagatatcaaacaattattgaattaagtaaattaaaacctgaaactttcttaaataatatattaaataattcattatcgaatgctttattaaaattattacgtgaaaaaaatccacttattagaaatgaaattatttatttcttatcaactttatataattatcaatcagaaaataatattattgataatgataatgattttattaagaaaattccaaataatatattagaattaatttttataaatgatttatcaattaatgcaactgttgatttagcattatttgaaaaattattaccattttcagataatcccaaagatcgtgttaataaattattaaaattaatttcaattttaaatcataaatcattatcatcattttgggcaataatgaaaagacaaactcaattatcatcagttttattaaaattattaacaatggttgaaaataataatgaagatgatatcgatgatcaaattaataatgcaattaattggttatctaaaagtttcccatcatcatatgaagctgaatcatgtttaaaatattttttcaatttaaaaaataagagattaattagattaatgattttatgttcaaataaatcaactgattatgatacaattgtaaatagtataagagaaattttaaatagaattaatgaaatgaaattaaataatgaatttaatccaggtgataataaattattaaataaaactaatatttataatacaattaaattattattattaagatcatcaaatattttttataatattgataatatttatgaaattattataatgaataataaaaaattaaatgatgagacatgcaaacttttattaaataatatatctgaaatttgtccaattgttttagaatcaaatattaaatcattaattaattcaattataaatttatctaaatcaattgattttgaagctaatagaattgataatgattgttatcatgatttaaaaattatttataattattatatttcaaatggtaatgatgaaataattaataataataatgataatgaatttcataattgtcttttcaaattttcaattaatggatcaccaaaggaatctaaatattcaattaaattattaaataaaacatcaaatgatattaaaactcctttatttactaaaattgtaaatattatttggccattaaatattgattcaatttattttaatacacatttatcaacattatcaacattatttcaatatgatatattatctgttgatacaattaaagaagatattagtaaatatttagctacatatgttctattgaagaatacgataaaggaggaagaagatgatgaaaaggatacaattacatggatcgatgataaagaattatattataataaacaaaatgtcaattgtttatctaaaatattaacaatgaaattattaactaattggcttgtttcaataaatgatgatttaacaattgatgttgaatcagttgccaaacctatattaagtatgttatcatcatatattaatagaggtggagaaattgtttctcaagaggatacaccagaaaattaccgttcaagattaagattacatgcaggttatcaaattttaaaattaagtaaatttaaaatttttaattcaattattgatcaacgtagaattaatagattaattttattaattcaagattctaataataatgttagattaaattttattaataaaattaagaaaaaattaactcaacataaattaaataaaaaacttttaccattattatattttgttgcatttgaacctgatcgtttaattaaggaatcaacatcaatttggattagagcttcatataataaatatattaataaatcaagtactgctgattcattaatttttgaaaaatcatttattacattaattcatatgatattcaatcatcctgaatttaaagaattatttgttgaatataattctatagaagataacgataatgaaagtgaaattactattaaggccgagaagtttgaagaacttgctaaatttggtttaacatatattatctatttcctttcacttatagttacatctgaaaatatttcagtattattttatttaactcaaagaattaaacaatataaaggtaaatgtcttatacctgaaaattccgaaaaatttgaagattcaatttatatattatctgaattaactgaaatttcaattaaatttataggtaaaattaagaattggagtattacagtttggccaggtaaaattaatctaccaattgaattatttgataatttagatgatttaattgctaataatataattaagaaaacatttattaatgaaaaatattttgaaattgttgatgaaataattaaacatagatggaaaattgagaatggacaagttggtcaaaggaaagttagaaataaatcaaagagtacaattagtggagattctaaaactgttaagagaaagttggatgcacttgataaagaacttccattgaagaaaataagtcgaaataaagataataatgaagaatatgttactaaaactaaggaaaatgatgtgatacctacaagaaatagaagtacacgagcaaaacgtattaattataatgagaattaaattaattagattatatatataatattatacttacttacttacttattcatgatatctcatttgagttaaaactaaaactttaccaggtaatgttgtaacaggtgttggaactaataattttaatttctttgtagatgatgtaaaacctgaaacgtaacaaaatcctaaaactgaactcattgttacatgtttattaattattgaaagtttttccttttcatcaatatcatttgatgataataatttctttatatctaaatctttatcatcaataattgaaacaattacattcattaaatcagtttcctgtggatcatcaattatttgaaacatattattatatttccaatttctctctaattttttcttagaattatcattatcattcccagcaaatggatcataatcatcatcatcattatcatcatcatctgcatcaccattcataaaatccattaattccatatttgaactatctaattcttttggttttaaaaaaagaaaatcagttgtaaaacaatgtaatgtataaggatttaattgacatctattactaccataaaaatattgtttaattgatttttgttgtaattcacgttgatattttggttctttttcaatacaaccacttgaacgtggcattttaatcatatggaccttatcatttaatgttaattttttacgtaaatcaacaagtaaacgttcattaccaacaactaatataatattaattctaaaagaatttataatatgttgaattattttggcatttgatacattaaatgcaggtgtatctattattatattaccttttaaatttgaatttgaatttaaatttaaatttgaaatagataatttattatcaatttcaattgataattcatttattaaacatttatataattctaaattttctgtaaatgattctaatccataatttttaactaatggaatttgtgatctataaagacctgtaccaggacctgtactcattgtttcaccaaatgttgttgtttcaatatctaatgaatcatataattcacaagcagttaattgtgatggcattgtaaaatgtgataattgtggatttaaattaattattataggtttagaatttgatgttttcaatgaatatgatgaaagtgtacgtgctaatgaagtcttacctgaatcttttggtccaattattaaaatacgtgaattagaattattattattattattattattactaatattattcttttcaattgataaatgtaggtttaagatttgctttaatatagtttcttctgatatgtattctaaatctaatggacttgtagttgtataagatattttacatccatgatatgttgaaattgcaaatttcattgattctttaaaagtataattaatatttgatgttaattcagtaccaaagatttcagctgtaccggattctaatttaatatttaatacaccagttctcgatgtttcaactctccattcatgaaaggcgggtatctctacctctgttctagctaatgtaaagtccattaatcaatagtaaaagaaagaaaagacgtaaaacaaaagaaatgaaaagttatttacatgctatacatgaaaaattagataatcaaattcaccatatatttacattcttcttcttattaagcaaaatgaccactaataccccatcagatatccccatcaacccattggctgccgttaaagcccaacgagaagcactgaagaacttctataaactaaaacaaactgaagatacatcaaataatacccccagtccccccaatgacgacactaaatcaataacatcatcacataagaattcaattgatgatttaattgattcatttaaaattgaagatatagaagaatttattaatactgaatcttatattaatatacttaaaacagaggataaagtattagataaacttaattctgctaaaagtgatattaaatcaattatttataataattattatgaattaattaaaattaattcagtattggaaggtttaatattaccaaatgataatagtgtacatttagataatatttctaataatctgacaactatacaatctaatattaaaaatattgcatctattaatacagatatatttaatgatttaaataataaataactttttatatatcaagtaaataatcaacatttaattctttatctttcaatgtttcaaatacttcccttaatactttaacacatgataaataagtaatactattcctatcatattcagataatgcaacaattactgattttttcaatttatttaaatattcattaatccattcaattattcttaaattatttgaaatatatttcttattcttacctttcagactttgtttgataaatatttcattccattcattccaaattttattaataaaactcatataaactaatgataattcacgaatatatgatataatcattttacctgtgatatcaattgtatcgttattactactattcattaaatccgctgaattatcaatacttgatctaatatttaaagttcttaaactatcagatctacttattgttaaatttctcttaactgatggaattgttggagatgttggagaatctaattctgataataaattatcatcatcaagattattattattattaccaccacaatcacctccaactctaattgatccaacatattcttctaataatttacctcttgaatttaaaaaaatttcagatgattctttacctttatttaataataaacacatttcatttgcatttttaataatttcaatattatttgattcacatttaatttcatttaataatgaattaattaatttttcttcaatttttttaatattaattaatttaatattataaattaaatgaaattgtcgttgaaaaatatttgaattattatcatttaaagttttagaattaattaatgataatgataaaccaattgcaattccaatatctaataaatttttaatttcttcctttaatctatttaaatatccaatacattcatcatatctacataaacctaattcaagtgaacatgaagttaataaatcatcaattaatgtaattgatgaattaaattcaggttgaatttgtttttcaatattattatttgaacttgaaattctatgtgatgaatttggtcttgttaaattaatatttgaaaaagaatttgaattatgatgatgatgatgatgattacctggattattactcaaattattattacttcttctctttaaatttaaaatttcagatctagcttgattaattgcatttataacatttaaatattcaattgaagtatcagtttgaaataaaaaaatttgatttgaatccttttgtttaatacataatgtagttgataaatttgaatttaaacttgaacttaaattagaattagaattagaattattatttaaattatccatagattgattaaaatttttcatatctgatacattttgtacaattatatcatcaatcatccaagaataagttgcaacatttctaatattagaattattttttttagaattaatctcttttatacgtgaagcaataagtattgaatcattcataataactaaatgaactggacgtacaggtttaaaagtaattgaatttaattccccccaacgacgtgattctataagtatatgtctcattggtattggaggtaataaatcatgagcacgatcaatatttaaataaagttttttcattgaattagtccatttattttgtaacattgcaattgattgtctattagttttaaatccagtagtactattattattattattactttccataaattcattagcttcattaatttgttgtgataaaacatcagttaaatcattaattttaggttttaatgaattaagaatttcattagtatttttaaaagcattactaactgcaagtacttgattaattgattcacttaatgaaaatttaatttcattatcattattttcatttaatttatctaaataatttataaatgaatcaattttatttgcatcagcatcaaataattgtctttgaacaaatgttgatgcattgaagttttcccttgataattcataaagtatattattactatcatcattagtagtttccttaattgtaatattattctcatttaaattagttaatgaagaatttaatatttgattatgtgcattaaatggtaaaggtggagcatccattccaattggaggttgtgataatttaattgaaaatcttctccttgtattacttgttgcattagttgcattagttgcaccagtttcaacagatctaattgattcacctccaattgttaattgacttttattattataattattattataatattgattaacattaaatgtattattaccattattcatatgatcatttgatccattctgattaataaaagcagccctagaaaaccgtctattgatatctgtcatagttatccctagaataaacaacaatcatctacaagataaaccttcaagacatgtataatgatcataatcgctatattaaattacttaaatattacataatactatcatatatcactaactaaaccctgttaaccatttatcattcattatatcttgcattgttggtctattatgaacatctgtaactaatattctccttattagacttatacaatcatcacttatatcactatattgtgggaaatttattttaccatctaatatttcatcaacactgcaaaatggattctccttaaatattaaagtatataaaagtacacccattgcccaaacatcctgtgatttaccttcatatggttgaccatttaatacttcaggagctgcataatctattgtaccaacgaaaactccaaatggtccatccttaacccatgcagcagatccaaaatcaattaatttaacaaaataatctttatcaacaattatattttcatctttaatatctctatgaacaattccattaatatgcatatgatttaatgctgcaacaatttggaaataaatatattttgcctcatattcaatcatatctctcttaatttcaattatatcatataaatcaactgctccattatttttaccatgttgcattgtctctaaataataacattgatcatcttcaaagaaatcaattattctcattatattagcatgtgggaatttatttaatgcatataaaatttgaatttcacttggaactgtacctaatgatttatcacgtacccaagtatcaactaatattctctctttgaaaattgccttaacacaatctctatataatgaatctttcttatattgtgcaaatacaactttaccatatgctccttgacctaaatttttcaatatttcaaaatctgtaaactttttacttcttttctccttaccaattactttggggaaattaattgaattttgttttaaatattctaattctttattctccctatctaaatgttcttgacatgtaactggtgatctcagacaaaatgaatcagttctattaatcttaggtggttctattggttccattggttccattggttcatgttccttctcttctttttcctttgaaatcgatgataatgataatgataatgaagaattcattttaaccaatgaattagttctatttattttaggtgttgttggtgatgaattatttgattgattaattgttttaatactacttgatctacttaaattacttgatgatgaaccttgtgaacttgtatctaaattatttccatctctattttcaaataattttaattgtgatggtaatgaactattacttaatggttcatcattaaaatgatgaatatctaatttatcctcaaatcttatacttggtttcgcctcgatatttccaacattctcactattattaggttcactgactttaatttcaggtacaactttattatctactattttttcaatatgataaactttattagagaatgaacgacaaaatgtaatccaaagtaaaaaatatttattatttgatatatgtaattgaatatcaacattaattacattaccatcaatatgtttaccattaataccttttgaattaatgaaaatttcttctctttccttatcatttttaccaattttccaagaatttaattttctaaaataatgttcaggtaaaactaatccatcttgatttaataaatttggattttcaattaatgctaaatttaataaatttgtaaaatctggtaaaattaaatcaattgattgatttttcaattctgatgtaccaaataaattttttgcaattgcttcattaaaacttttaattgtataatcttttgatgaaattaagaatgaacctgcaatatatggtaatgaatgtaaattaactctaatataagatttagtaatttcatcatcaatattaagatattcacttgtaattgcacagggtacaaaattattatttaaatttttcaatgtaaaatatcttaaattattaattaaatttgaatctttagaacttgttatatcattattatttaatgatgaatctttataattattttttaaaatattagataatgaaggtaaaaatgttgataatttaaaatttttcaaatttttttcataaagtgaattattttgtttaattaaatcagaaacataaaattcattttttaattcattatctcttttaattataatatcaattgtttcacatgcaacttgttcgaaaattaatataataaattcatttttcctctttgcccataatgaagtccaagctaatccattatatcttttaactgcaattatttcacctgacataatcaatgatttatttctataaagtctatcaaatactaaatctcttgatcttggagcaattaaatccattaatttcattttacataatgatgatttacttaaaccaaacattaataaacctaaatcattagcattaagtaaatcccagggggaatttaatgaaactgtgaaaactgcttttggagatttagttttagcatttgaagttgcatgatattgtcttgtatttaaattggaagtattatttaatgatgataggcctaatgttgaagttgttgtattagaaatagttagtccagggatattattattattattagtagtagtataattattttgttctatgaaaggagttgctaaagcatgtaaaattttaatttttaaaaggttaattctatcatttgaagatgatgaaatattagataatgataaattatgtaaatttaatactttttcctctatatcatcaatattattttgatcataatcttttaaaagtttaagtatatccattaattcagttattgttgaatcatttaaattagaatttgaatcggaatcagagaaggattcagataatggagatgatgaaatgctattaggttctttcatattaatagtattatatagtaaagtttgtaaagttgaacttgaaatatttttatctaattttaaaagattattatgaatattattattgttggtattaaaattagaatttaaatgaatattataatcagggaatgattcaattgaactattaagccaatctggattttcaagtaagatttctaaagatctttttaaaacatttaatctcatagttaatgaatttatagaaacaggtgtataagaataagattgtgaagattctgttgtaaattgtattaaattgttcatattattgttcatattattatccattgttaatggagtatctaaactttcacaagaatttgaattatcatccattaaataaaatttactattattattactctttgaatcaatttgattattcattaatgaatggaaagcattttgtcgtattgaatttgaagaattatctgatttaagagatttactcttagataaacttctcgaaggaggtgtatacggcatgtaaaatggatatatcaatagaagtttaaaagaaagatgtattgaataaagggttgatatacagtacatagtaaaaatttaaaattattaagtgaggtcttttataagagtatttatattaagattataaactattagataagattctttgcaagtaacagttctgcaataaggacacctgaacctgctgctccaataatagtattatgacttaggataaccattttataatcaaagattggatcaggtctaattctaccaacactaacaccataacctgaatctctatttctatctaatcttggttgtggtctatctaattgttccaagacatgaattgcatgttcaggtgctgaatgacaattaagtaatttagcttcacagatataatcccttaagcaagttttaatttcatctaatgaaggtgcaggttgatttttaaatttaaatgaaacacattctgtatgaccatctgaaactgcaactctattacattgagctgaaacttttaattcatcatcaagaataaattgagttgaatcattgtttagtgaacctaaaattttctttgcttcccattcaattttatcttcttcaccagagatataaggtacaatattatctaaaacgtcaatacctgaaacacctggtgagaaacctgcacctgaaattgcttgtaatgtagttgttgaaacaaattgtaatggaccaaatttatcaactaatggttttaatggtgcaactaaacctgcagttgaacaattagagatacaaatttggtaacctttagtatctggattattctttaatctattttcaatcatttgtaaatgttcagaattagcaattgggacaattaatggaacattttcatctcttctataattttttgcattagaaataacaactaaaccattattaacaaaagatttttcaacatcacctgcaacatcagcatctaaacctgaaaatacaacatcacaatctttaaaagaatcatatgtacattcactaacaattaaatcttcaacatttgatggcattaaatcagtttgtttccaagtacatgcatcaatatactttttaccagctgatcttttacttgcaccaattgcatgtaatttaaattgtggatggttagccaatagtaagataaaacgttgaccaacagaacctgtggcacctaaaactcccgctttcttatatgtagtcattacactataggatacagaaagaaaagaagcaaagaagcaaaagaagaagaagaagaagcaaaagaaagaagaagaaataccaaatgactcaccaccatttaaaccatttccttatataatctctctttctataagtaacaggtcttattgatgctgtaggtctttctataggacagtacaacactgtatctgtgtctgtaactacactatcatcatcaacatcataccatactaccctctctaatctatctctttcactatcccccaatacagttataccattacttactaaactatctaaatcaattccttcactacgtattgtatccaatactatcttatcccttactgtattatactcattacattctaccaactcataaaactcctcttcacccatcatctccttagccttctttaatatcccatctaatccatcatcaatatcgtctttaataaacacttcctttccatggattgagtcagactttattgatatttcactaattgggaatgtaattgttgtatttgaactagttgtaacccctgataagtactgtatactatgattactacttattctactattggctagtttattattaaatgattttaatcctatgttattctcatcaatactactatttagaataatcccattaactaacacaggtgtaatacacttatcactacatacactactaattatattaccactactatacttacttaccaacatcatactacaagcaatgaatctgctaaaagaaaagagtatctatatctaataagggataaattttctcactttaactaatcataccttcttttaaccaatgatcttacatcttttccataggagaatactatacattatagtatctattatactattactcctacttcttaataacatatcacctgataataaattatcacaggaaattcaacatgatttacaagtattaaaggatacaagtaataatttactaattgatgaaaataataaagatgatgatgatgatatcatacaagatacgatacaaccatgtacaattactaatccattaactaatcaattctatgatttaagagaattatcatcattattggataatgaaattcaagcttggaatagtaaaggtttcgattatggacataatttttcaattggtatttgttcaactccaattaagaaccttaataatttaacacctttggattttattgattcatcaaataaatcaaatattgcaggttattatactaacgaacaaggtaataaagtttcaattggttcaatttcatcaaatttaaaatttagaggtatgaatttagtacttgaatatacaaatggtgataaatgtgatgatagtaatgaatatagaaagaataccctccttacatttaaatgtgatagagaaatgatgagtaaggcaagagttaattatttaggttcaatgaataattgttcttatttctttgaagttagaactgttcatgcatgtgcaacttcaaatgaaaaggatgaaactgcaatttgggggattttcctattgatttcactttctgcattagcagtttacttatttgcaggatttatctacaagattattcaatcacattatgaaaattcaattaaaaaagataaaaagggtggattaattgtatagaaagtttgtatactaacagcatatttttttttctttatttagtaaaactctttccttttgtaccatgaccaaacgaaagagatcacaatcaactacctccaacaaaaaacgtaaagttgatgattcatataataatgatgatcttaatactattttcaataataaatcacaatttcaaggtatgatgaaaaaatattggttacaaagacataaacttttcactaaatatgatgaaggtatattattaaccaaagaattatggtttagtgttacaccggagaatatatccaagtatattgccaaatatataggtaaacaattcaacaataagtttacaatactggatacattctgtggtggtggtggtaatattgtacaatttttaaaccttaattgtaatgtaattggagttgatattaatccaattcatttaaaatgtacagagaataattcaattgtttatcatggtgaagacatcaagggaagattgaaattattaaaaattgattggaattgtattaatgaaggtacatctgttaatcaactcaaggatatgaaaattgattgtgtatttggatcaccaccatggggtggacctgaatatattaaaacaaaaatctatgatttagaaacaatgcttttaccatgtggacttagtaaacatttacaatacatgaaacaattctcccccaacatttatctattcctaccaaagaatagtaatttaaatcaaattaaattagcaacaagtttaaataattataaaaaagttcaagtaatttatttaaataataaagataatagaataaagggtattttatgttgttggaaaggtaatatgtaatatgtaatcttttatatcactcttgtaataaattattaacaatttcacttaatggaccaaaatctgattcatttaataattgaaattctttaccaattaaagctgcatgttttaatgatgtagctaaatgaatttgaatccccaatgcagttaatgcatcaccatgatgacaaaataaatgtgcatgaattctaattaatcttcttaaaattgttctacataatgcaataaattgctttggaaatggtacacccatctttgttgggaaaattgattcatcatctaaaaatgtttgaacccaattcattaaagtttcaacatatgcaggtgcacttaatggtattggaggttgaccatttctatgtaatggatcttgccatctatattcatattctgatgttgcaatcattcttggacaagttgttggggaacaaaaatttgtaattgatccataaagcatattagtatgattataaatatcaacaattgcaactgctaaccattcattaatatcctctcctggtggtaatttaattgctttagctaatgcacctgtacctaatgaactttcagcatgagctcttaattcactatgagatgatggtgtattggtatttactgtaccattattttcaagtgttggtctaaacctcctacgtgatgtctgatatgatggtacctcaggtaatgtaaatgacatttggtctgttctaagaagaaagatgtattgataaataacataacaaacatgaaagtatttacctttaacctttttaggaagagcgtttggtataaatagagagatcggacattacttttccatataatcctcctttactactctttccttttggtaaatgtcattaattaaacctaatatcgaagataaaacagactctatagttccagaagtggaagtaaagaaatacagagagttattatcacttgaatcccctatctatgattttgaaatcgtacctggatttttcaaacaatcatcattagacactgatgatacaacttatgattcattaaatgatcatttaggtttaaataaaccttcatgggaaaatctcctattggaacttcaaacacttaactctaattctcctgcagatactaaatataaattaattttctgtgcaagacatggtcaaggatatcataattatacattatcaatagttggtagaccattatgggattcattttattctcatcaatacggtgatgttaaattacctaacggtgaaattgtcaattatggtcctgatccattccttactccattgggtgaatcacaggctaaatttattaatgaaacattaataaaagaaattaataatggtatgccattacctactaaattatttagttcaccatttacaagaagttgtcaaacattgtactattcaatgaataatatacttatgtttaaaaatagtgataaaggtcttaaacctttaattatggaaaatttaagagaaactattggtgaacatacatgtgatgaaagatcaagtaagaaagttatagaggaaagacttaatggttgggggtttacatttgaagatggatttacagaaaatgatgaattgtatagatctgattggagagaaagtgttggagaattaactattagaagtaatagattcttacaaaatgtatttgatgataaatataatgatgatttagttgtttattcatcttcacattcaggtcaagtaaaatcaatcttattggctgttggtcatagaccttatattatcccaactgcaggtttaattccaattgttgtaaaggcagttaaaagaaagtaaagattgtatacattgttatttatttatttattatttattatttataaactatttatttttgttagattttcatttgcaaaataacgtacatcatcatcttcatcattatttaataaattttctaatattggtataatttcattatttattatatttaattgattattttctttaaaatgatttgcaaatttaaacattgatttagcaacattaaatctaatatttggtacattatcattaattaaatctttaataaatggataaatataattttctaccaattcattattaacaatatcaattaatttaacaaatgtaaataaacatgtaattctacaaataaaattattaaattcttgagtttcctttttttgtaaaattttatcaataacttgatttttactccattcattaccaaataatttacataaaattgataaattttcaacagctgcatttctaattgaataaactggatcccaaagccaatccatacaaagttgtcctaatgatttatcgaaaaatgatatacctaattgttgtgctaataatgggatttgttcaataattgctaatctaactctccataatttatcatttgataatgaagtaattgcaggcattaaactttcatttaataattcaataccaattacattattaacaatttctaaattagaaattatatttaatctaacatcactaaattcatccttaagcatttcaatgaaaattggtaaaaggaaatcaattgttctttccttacctaaaattggagataaattactaatctttgaagctaatgcagctctaacattttctgattcatcattacttaattgattaattattggtaagatttgttcaattaataatgaagggttaattaaattaattttagatgaaaattcaggtaattgtttagaaattgcctttctaacttctgattcattatcctttaggagtgaaataaaatgtggtaataattttaatgtaaaagaatcattattaaaattatctgataataaattaaatttatctgcaatcatatatctaactctccaacttggatctgatattattgaaattaatgaatcgaaaagttcattaattgaatctgtagttgaggtggtattttcagtggagttattaagtttattataataagataagatttcaataaggacatcaattgataaaaatttaacagaatcttgattatcattgattaaagatttatacatttgcaaaaataaattccaaacttgttcattaattggttcattaagtgatgaaataattttaggtaaatttgatgcagcagcttttctaaccattggagaatcatcaataattaaatcataatataattgaactaatttaatttttaaattaaattcatcttcaattgaatcatttaatcttggtaaaacagtataaaataaaccagttgcagctatatgaagtgaaaaccatctttctttagataatcttataattaaaggtataaaattttccttaatttgatcaattgataattgtaatgatatattatttaatgaatcaactgcattatctctaacaattggttcctcacaagctgaaattttctctaaaagtggtaataataaattagcaaattgaacaccaccaataaagggtataaaatcttttaatttagaggcagcaattgcaataacttcatcttcatcctcagggattacatcttcaaggaaaggtaataattcttcccttgtacgaattggaccaagagcaattgcaattgtatctaatctattcattgattgaactctagatgcgacatcatcgtgtctaagttcatccataagtaatgctataggatataaatctgttgacatagtagttatacactattatacactataccttgtataatctccttagagaagagagcagtgaacgtagaaggaggttctttggaaagcagctgagcattaaaattgccaccaccagggcaattcgcgtattagaaggcctaggtggatgagcctgcgtcggtgggactacagtattagtatgtgtagtctctatactgtgtatactgtgtatactactggtatcactctctgtactctctgtactctcagaactctccattatatcactaactgcagtggcagtacccggtaatctagctctcaatgccttgttcattgtcatacactctactaaaagaaagaaagagatagtaataggattattatagtgaggaaatcaaaattaaaattaaatttcaattcctttaactttacaagggcaaatactctatctttatactacactccttcttttagtagacaatatgagtagaagatatgatagtagaacaactatattctctcctgaggggagattatatcaagtggaatacgccctagaggcaattgctcatgcaggtacaactttagctatactttcaccaaatgaaggtatagttttattagctgaacgtaaaattatttcaaaattattagaatcatcttcaaatagtgaaaaaatttataaaattaatgatcaaacaattgtttcagttgcaggtttaacagctgatgcagaaattttaattgatcgtatgagaaatgattgtcaacaatatttaaaaatttataataaattaccaaatacaatgcaagttgtaaataaagtttgtgattttaaacaaggttatacccaatttggtggtttacgtcctttcggtgtttcatttttatttgctggttatgattcattaaatggtttccaattatattcttcaaatccttctggtaattattctggttggttagcaacttcaattggtgaaaattcttcaagtgttcaaacattgttaaagcaagaattaaatgctaattcaacagtttctcataatgatatcacacttgatgatgctttaaagatagctttaaaagtcttatcaaagacatccgataatactcacctctctgcagataaacttgaacttgcatcattatctctacagagtaataccaacaaaccaactatcaagctctacactcctaaagagattgataaccttctcaatctccatgatctgtcaaagaaagaagaagagtaagtctttaatagtatattatatagaatagattacgtaagtttaacatttttcaaattttggaagttttacctttattatagtgggactgtaagtatttctactatttgccactacatttttccttatacaacgatgtcccgtttagctaatataatctccaaattagcattaccagtatctgctgctatcctcattgccgatgtttccctctatgatgttaaaggtggtgaaagagcagttattttcgatagatttcaaggtattaaacaatcagtagttggtgaaggtatgaattttgcaattccttggttacagagaccaattattttcgatgttaaaactagaccaagaacaattacaacaactacaggttctaaagatttacaaaatgtttcaattactcttagagttttacatagacctgatgtattgaaattacctcaaatttatcaaaatttaggtttagattatgatgaaagagttttaccttcaattgggaatgaagtgcttaaatcaattgttgcacaatttgatgcagctgaattaattaatatgagagaaattgtttcaaatcgtattcgtaatgaattagaattaagagcaaatcaatttaatattaaattagaggatgtttccatcactcatatggcattcggtattgaatttactaaagctgttgaacgtaaacaagttgctcaacaagaagctgaaagagctaaatttttagttgataaagcagatcaagaacgtaaagctgcagttattagagctgaaggtgaagctgaagctgctgatcatatctcaaaagcattatctaaagctggtgatggtttattacttattagaagattagaagcttcaaaggaaattgcttcaactttggcaaattctccaaatgttgcttatttaccaagtaatgcaggttctccagattcttcatcttcaagttcaaattctttattattaaacatccgttaggattatctcttcacttactcttatttctgtatatacaactataactcttatataaccaataaaatgaaaaatgatgacattacatcatgactataaataatttatcaaatgcacaaagtattttttaccatttcattatacttaattcttcttcctttattaacaatgccagcatctaataacattgcatgtcttaattgtcgtgagaagaaacttaaatgtgataaatctcaacctaaatgtaatcgttgtaatttaaaagatatcccatgtgtttatttacaacataagaagactggcccaaagaagaaatcacaattgaatattcaatctcaatcaacaataacatcattaagaaatgatataaatcatatacttaacactaacagtacatcatcatcatcaataacaacaactaatactacagatattccaccatttcttgcaaatttaaacttaacaatgaatgatgttgatagatttcataatttttattttaattcaaatacacgtatatttacatattcatcaataagatatcgaaatacatttgctaaagatcctcattcaattctccattattcttatatgatttggacacttagtgcattttatttagatgaatatcaacatttagttgataaattatatgaaactgctttattacaattaaatacttattgggaatgtattagagattcatttcatgctgatatattaacttatttacatgcattatgtttaaaatcacaattcgaattcctttcaggtagagaaatgagagctgcattaactgtttcttcatcaattagattaactcaaatgtttggttatgatcaaattgatttatcacctacaactttgggttcaccagctattttctttagaaattttactttatcttcaggattagaggcaactaataatttacttgaagatgattatttggatccagaaatccctttggctgaagagagaagaagagttttatgggaagtttatgcaattgataaatggtcttcattagttactggtttaccatgtgcactttcattggatagtttatctgttattttcaccaaattaccttcaccaacgacctttttagataatcccaaagattcaccacatgataataataataataataataataataataaagaaaaaataccaaatcaaaacgattctaatgaaaaaaaaattgatactaattcatcatcatcagaattattaaataataatcattcaggtgaagcatatttttctaaaaatgatttaaatataaataattctaataatgaaacaagttatttccttcatgatgcaatgaggaaacttgatgataatcaagttttaattgatatgaattcttcaagttctaaaattttattacttacaatttcagaaaatataattaaatggtgtaaaatgtttttaaatatggttgaattgaaaactttaaaatcaaattcaagtattaattcaattaggtcaaaagttgatgaattaaagaaaaattttcaaagtatgcatagtaatttaattttctttgatatgacaactgaaccactgatgaatattgttgttacaaatacaacaactcttctttatcaaactgttttaattaaatttagttcattatttgatattcaattaaaggaagataaatcaggttcaaatataaatcctaatgcaattcacctatttaatgatattttacatgaagtttcttttaaaagtgaaaaattaattattaaatttattaataaatcaaattttgaacaacatttgaaaaaagctccagttttcatagttttcattaatagtattaaatcattatttcaatgtattgcatttatcaaaagatttaatttctttttaaattttaataataatgaaaaaatttcacttttaaatactttatcaacactttcaaatattttcaattcattacctcaaaaatctccaattgttgaaaaaactaaaacaattataaataatggtaatgaattgttaaatcatgctcctcaatcattatccttctttgattctttcttcgattccgctaaaacttattaactttaatgtctgtatatgtttttctgtatttttatataattttgttaacgtttaatgattatgattataaaatgtatttatcttattttacatccaattatctaacatattggctacaggtgcttttttagcaatagtggtttttttaggttcagttggtttggtgaagtcgtctaacatacttttaggttgaactgtattttgaggttggaaatcatcaagcatacttttcggtttaggtgtaggaacagcgtggaaatcatccaacagacttctaggttgagacgtcttaggttggaaatcatccaacatacttctaggttgagacgtcttaggttggaaatcatccaaaatactctttggttgaaattcatctaacatacttggtactttggaacttttagaaccattacttgaaccattcataaatttagcaagtatatcaccaggtttctttctaacttccttaacttcttcaatttcctttactttaacatccttaactgaatcaacttcagaaaatttccagtttttaattaaatataaacctaaccaatcacaacccattttgaaatacattgttgaagatttcataacaaatgaaaattcatatttacaatccatttccttaataccttcataatataaaacatttcttttccttaatgaattgtataaaataagtaaaactggatcctcagtaaaatttgttcttataacattagataaatcaggacattggaaatttggtaataatttaattaaatcatccttaattaatgtaagtggtttaattaatgcttgagcagattttgatttatttttcaaaatccagaaaacccaacttaatctccatctatcattattaataatagcatcttttaaaatacctctctctaaaatacttttcattgaatcaccataatcacaatcttcataacatctagaaactgcaattgctaatggtaaatcattcatttgtctcataataacattaactgcatccttaggtgaatctgcaagaaggaaaaatgttgccgcatcactatatctatgtttaccaagtaaaacatatgcattcttaagtgcagctgatttccatctcttttctttaaaatcattacttaaaaatttaaccattttttccctctctctatgaccaatagaattcttccataatcctaataaaactttctttttgtgtaatgctaaataaaatattgaacaaactgatggatctttattaccattatttaaatcttgaaatttaataaattcattagctgcaataatttccatagtttgctgtaattttttattatctaaccataatggtaataaataacgttttgcattaacccaatcaattttagaattagattgttcattaacaatatcaaataaaatatctctattatcggaatgtaacgcaaataaaatatcacgaaatcttatagtttcaatagcattaattgctgattccttggtttgattaactttgaaaagtttcatacctaaataaaattttagtccattgaaatctaatacattaaaatatttcaataaaatatccttcataatagagacagtatgtgttaatgttatctgttgatgtccagttaaaaatggtaatcttatctttgtcagtttttctattagtatatcagcacattctgaagaaaacttctcatcttcattatcatcatcatctgtactattatcccccagcataatttcttccttactaatacctaagtcaaaatcatcttcctttctttgtcccaaatcgatttctcttaaaactcttgataatttagtcaatattttattaattaaattacgtctttcaccaaataataattgaattataaattgtggatgatataatggaagtggtccatttaatgcagatgataaatgtaataagtcattactcataatttccaaactaccaactactttcttagttattggatcattcttaaaatcaagttttttatcacttaaatataattgattacctgtaccaattactaacaatccattactcatccatatggaatcaccaatttgatgtgttgtttcatttgaaatgtcaattttcttaattttcgtaaatgatggaattttattggtataatcataacgtaattgtgtaaataataatgagtgtgatttaaatccaactgctaaaataccttgtccgtaggtagttgatgtccaatctaaatctttaacaatttcattttcaaaaatttcagaataatccattatacctaatttcatatcccaaatacttaatttttgtttactttcatcaattattgccattttattaattgatgacccagaaataaatgagcaataggagatacctgttttaaatgaatcctttaaatgccatttaattgttgaatgattatttaaatcattgttatcatcatctgtaaatgttacgtaataaatagaaacacgaccagtggatgaaacagttgcaagtacatcacgtccaatattatcaatattcttcccccagccaacaggatctattggtgaaataatatgtaaatcttccttatccagtattctcaaatcatcaatcatacattcagttagtgaacaagtaatattaccaaattcacaatgtaaaaaatgtcctttaactgtagaattactatcaaggaccttgatatcaaactcaaatgatttacatacaccagttttgtaaattaagatcaaatggcaatttaatttgtttgattcaggtaatataaataaacattcaggtggtgtatcggtattgatttctattttgcgaacttcttcagatacaagattatgttgattgctagtggatgtatggaaagcaattaaataattatcaacgattgtgaaaacaaaatgtcccctattccaaataactgcatcaataactggagttttagttataattgtggattttttagttaatgttgttttaccatctgataggtaaataggtatccaaagataattttctgtaaatctagtaagtgataaaattgatgaaccatcacttgatctaatcagtttcctgactgatttattatgacctgtaaatttttgattcaaacaaccaatctttctagttattgttttaagtatttttttatttgattggtgagtggatttttcaaaattaaagatttcattaaatgtaaatccaatttctctaattgtattatgaaataagtcatgaattactaatgataatgctaaatttggagaataatgatcaatttgaattgatttcagtaagaaatttccaggaattgaaggtaagcaatactttccaagaaataaattaactttataaaattcattattatgaaataatttatcaattttatatgtaatcatcttagatgggacagctgaacataaatttgtaaatccatataaatcaatttctccatcacttccaataaccatgcataattcagatttagattttataaattccatcatctttgtctgtttacgcattgaatgattcaattccgtataatcatgttcactctctaaatctgataacattttttcaagaccaagttctaaatatgggttatctataaatgttattgatttagttattccttttgatttcttaaatgtgtcgttttcaaataaatctaatgaacctgaatagaaaatatcaaatcctgtatctagtctataagttgaatatacttcaagctttgaatcagcggtgacaatgtataaaacgttatgttgatgttcgcttttaatatttgaatgaatcgtattgttttcagttaataatcttatatcatttttgattatactattggaaggtttcaatataaaactatttgaaggggtaatttgaacagaactaattgatgacgagttattagggtcagattcattcatttgacttttccaaataagatcagtaacataagtttcctgtgataaataatgtaattcaaaatcacaatattcattagtaaatccaactctatgccataatttaacatttttatcataataccctatactagcaatacaagttgaatttggtgatattttcactttataaatgggattgggctgagttttataccacatcaatgaacatttcattattttattatctggagtgtttggatctgcaacatatgacatttggtgcatttttagagaattattcgaacctgttataagttcacatgatgtttttgaattaaattctgatggtaaatcaaatatttgagcatcatctgaatctgaatctgcaacttgtgtatagtctgaccaacatagacaatttataatatcattatcattatggttatcgttggtaattttatgttccaatgaccattgaatcttcaattcacttaaatctttacgaccatggaaattgaaattataataattagaaacttctggtgaataaatatgaacttcatcctttattgcaatagcaattttaccattgacacgattaacatcaacggcaaatgaatctgatggtaaatataatgtttgtaaatgtaatgaatttttagttaaaataaccaaattattaccagaagtgtaagtcaagatctggattgtattccaattgacaaaacagcatgagtctggggtattattgggctgtcctggcaagaaattcaaagtcattgacctgttatatggtgtattaagtggttattcagtagataaatgacatttcatcatatattaagatatcctgatataggtaacaccataatgaaaattctcaatgacatggaagtaattttatcttaactcttggtacacactctttctcttctatttccttctctagagacaacaaatagatggttgcaagttgtaaggaccagcttaaacaagtggcaatatgtttacaaagatctccatgtgtgatgattgaaagaaatacccctaaagagtgtattaataaccccgaattaagtaaagacttaccagatctctgtaaggcacaactagcaacatttcttgaatgtaagagaggtattgttgatatgaggaaacgtataagaggtaatggtactttgagtacgggtaagtttgatgaacaatataagaagttatcagatggtgattttgatccaagggaagaaatgaagaaattaaagacattagattctaataggaaacaataaataacgaaagtatctaagaaacgtttatataactgtatatagtattaattaataacaacattattacaaatcatttgcaagttctacaatatgattgacaagtttatctacaagatcactggtgatatttggtgaattaaagacacatctaaagaattctccattatcttcacctgttatactatcattaggatttggtgcataatcaataagaaattcaccacttttatgtaatgcaattgctattttcctagttaatgcagtattttcattacctgacagtctaacatcaggtttaggattataatagaaacaaacttgtaaacaaggtattgggaaattgtttacaagtttaaaacctttgatattattcaatttagagacaaaatagttggcaatttcatatgaatgattgattctcttttcaaaaccttcattaccataatatagccatgaaagatacattttcaaagaatcagctctacgaccacatcccattgtaccattagccagatcgaaattttcatcatcatcaattgaattatggaaaaggtatggagcatttaatgaatttgattgtgtaaagattctctcatctggtaaaagtaaaaatgaacaagtagttggaactcctaacattttatgaggactaacagtaattgaatcagctaattgacatccttctaatcttttcttatgaatatcactgaagataacattaccaccccatgaaccatcaatatgaaaccaaatattatatttggaacaaattttcgatatttcagtaaatggatcaaatgatccaaaaacggttgtaccagcagttgcattaatatataatggtgtataaccatcttcaatagttgacaatattctcttttctaaaaattccattgacatttcaccatttccattaactggaattttgaaaactgaatttgctccaaatcctaataagatagcagatttttcaatactataatgactatgagcactggtataaatagcaaatttatgattaccattaccttcaatttttgtctttggatatttaatacttctagcaatttgcatactagtaatatttgaccatgaaccaccactgaatgttaaaccacctgcatatttaccgttaaatccaaacattgaggcatatttttgtgaaactttcctttcaatagcacttaatgcaggtgaaacagtgaaaacatgtgagtttgtgttcaaaacggagagtaataagtcagatagtacaccaataggatttgtaccaacatataacttatccatgaaacccggatgccaagtagaaattgagttgtttaatattttttggaaaacttgcaatatctccactgatgggtcttctgaaccggtttgaacggattgttcaaaaagtgaccctaagttgtttaactcgaagatattgtataaatctttaggattttcaaatctaggaccaatatctcttttaccattatctatatctttgacatagttgataattagatcaactgctggtttaagtaattgttcaagttcttgcactctatttttttccaaactacactcgattgtcattatctagtattctactctgatctactatccttatctataaccttctactggtcttattataaagaaatgaagttcaaattccgtttctatttgaagccacagtgaaaaatttcaaattttttcgtttttttcctctttgggacattttctattatcttaaggtcttctttaaatcttcaggtgattaagatactatagactgtaaaaaggacaatgaaatgagttcttcaagtggtaatgacggtggggacaatcttgcaggactagatattaaaatagtagaccaatctcatttagagagagaggttgcaattgatgcagataagacaattctatcaaaagaattacaaattgaagagaaaagacttgcaaaggcaaatgaaaaatatacaaagtatagtaatgctcttgctcaattgaagaagaaattggatagtgggaatttgaaaatttcagagaaaactagattatctgttcaaattgaagaattagaggaaaatgaattaattacatcgttaaacgacttacacgaaattaaggctagaataaaagacattaaattgaaaatggagtccaatatcgaaaaagatggtagtaattttgatacatctactactgataatggacctgttcaattacccgatgaaactagagatgaatatcttataaggacaggtaaaattaccgcattcggtacagcaaattcattcataactgaaaatgatatcaataataacaataatgaagatgtagtggaaatgccatcacataaaaatcttaggatgccaggtataaacactgataataatgaactgaataacgatgaagattcggatattgaaataacacattcaaaaacccaaactaatgatacaaattccgatgattttaaaattgattatgatgaaattaattcagattacgatgatgacgaagatgattacatttatgatgatatagatgatgcaatcggtactaaatcaaagaaaaaaacatccaagaaaataacttcaaaaacatcatcatctcaaatagatgatggcaatgagagatattatcaacaaagactatctaaatgggttaatgaacgatccacgttaaggaaaaaacataaccctgaatatattgataatccattagttgatgaatggtacaaacctcatccaaccgttaaagatgcagtattgcataaaaaatttaaattacctggtgatatattcccaagtttatttgattatcagaaaacttgtgttcaatggttatctgaattacacagtcaaagtactggtggtatcattggtgatgaaatgggattgggtaaaactgttcaaatgatatcgttcttagccggcttacattatagtaaagaattaagtggaccgatattgattgtttgtcctgccactgttttaaagcaatggtgtgatgaatttcatcgttggtggcctcctttcagagctgttatcttacattcaattggtgaaggtatgaatgataaaaagaaaactaaaggtaaaagtaaaaagagaggtattgatgatgacgacgatttttctgattttgatgatttatctgattttgaagaagaatatagtgaaaaatcaaataataatgtaaaaacattaacgaaaacaaaggataataaaaaagtaagagatttagttaataatatagttaaaaatgggcatgttataattacaacttatgcaggtgttagaatttatgcacaatatttattaccaattaattgggggtatgtagtcctcgatgaaggtcataaaattagaaatcctgatagttttattacaattacttgtaaacaattgaaaacaccaaatagaatcatcttatcaggtacaccaattcaaaataatttaattgaattatggagtttatttgattttatataccctggaaggttaggtacacttccaatttttcaaagacaattttgtattccaattaatttaggtggatatgctaatgcgactaacgttcaagttcaagcaggttataaatgtgcagttattttaaaagatttagttacaccatatttgttaagaagacttaaatctgacgttgctagagatttgcccaagaaaacagaaatggtattgttttgtaaattaactacagaacaaagaacattataccaaaaatttattgattcgaatgatttaaagaaaattttatccggtaaaagaaatgcattatttgggattgatatacttagaaaaatttgtaatcatccaaatttagttgatttaagcctcaagggtaaaaaaattacaactttacctaaattggaggaattaacttcaaaatctggtaaacttcaagtagttattgcattattagagttatggacaactgagaagaggaaaattttaatattcacacaaactaagcaaatgttaaatattttagaacaaatgctacaaattattaatcaagatagtattaaatataattatatgagaatggatggttcaacgccaattattcgtagacaagaattagttgatgaatttaataatgatcctaaatttaatgtattcttattaactactaaagttggaggtttaggtgttaatttaacaggagcatcaagagttattatatttgatcctgattggaatccatcaacggatatgcaagccagagaaagagcatggagattaggtcaaaagcaagatgtttcaatttatagattaattatggcaggttcaattgaggagaaaatatatcatagacaaattttcaaacaatttttaactaacaaaattttaaaagatccaaaacagaaaagattttttaaaatgactgatatcaacgatttatttactttaggtgatgatgatgttgaaggtactgaaactgctgatttatttaatactgaagaatctaaatttaatggtaataaaaagaggaaaactaaatttaaatcaagatttgataataatattaatactattaatcaatctggtaaattagaggaatctgataaagacttcattaatgcaaccaaaaaagcgggtgttgaaagattagaaaaatttgatgatgcaaatgttaaagaaaaatcaatgtttgatgatgatgatagtagagttaaaaacaatgaaaataataatgaaaataattctaatttaatgtttgatattttgaaaaaatcaggtattcattcagctgttcaacatgatgatataattaataaaatcaacattcatgatccaaaaaaaaatcaaagtcaaattgaaattgaaaatgaagcaactaaaattgctaatgaagctattcttgcattaagaaaatcaagagaattaacaagtaaatcaaaagtttatgttccaacatggacaggtaaacatggttctgctggtaaattaatagttcaacaaaataaattaaataacataactaggaataaaaatactagtataagtagatcagcttcaccaattgtttcctcatctaattctatcttaaacagtattaaaaaacggaaaactgatgctttaaggaaacctgtgactaattcagaatcattggttacacaattaagtaattatatggctggtgttgaaggtaatttcagtaaatcagcagatgttttggaaaatcttgatatagatttcagtgatactaaaactgttgatgttgttagaaacatgttgaaaggtatctgtacttgggataaggaacgtaaaggttgggtattaaaacctgagtttagataaatgtatttatagtattcgtatgatattaaatgtaataatatgtttttttagagatatttttatttaataggtaaacgttttaaacgttaaatttgaaaaaaaggaaatagatataagaggacaccgaaaaaaaataaaatatgataaaataaaataaagaaacaaaaaaatagagaaaaaggaataacgaatgatggtattatttcaaataattgtactaacctatttggtacctaatttataatcacctgcaagccatctgtttaacattgctaatgaagcttcaggttgatcatatggaaccatatgaccaccatcaaacattctagcaaatgtgaaataatcaaagtttttaacttgaccaatttgagttttaccatcatcagagaacattttttcagtcttagcattactgaaatcttccttacctgaccattctaatgcattagtccaagctttattacctaaccaattacaaataaaatctttatcacctgcataaattaaaacaggtaattctttttctaaaagatcaataacattcttatgataaggtttcatccaatcacctgcaaataagaaatttctattaacatcaaaattacatgattcgtaagtatcaacttcagcacctaatttctccttaacaacatcttgatttaaatatttatcaatatattctaaacctttataacataatgaagaaccttcacacatttttctaacatcataaacatttctaccagttttttgataaggaccaatttgaccattattacaataaatcgaagcaggaacacatgagaaaacagattgtgattcataacatgattcaataaatgataaacatcttggtaaatttgctaacataccttcacattctgcttcatctaagactggtttataacctgattcttcaccattacatgccataacttcatattctggatattgagttaatggatcagttaaaccattaccaattaatacagaagttaaattaaaggatctatcagcatgagataagatttcagatgcgaaaactggaacataatgaccaccataagattctgcagcaatatggaaatctaaaccattatattctgggaattgttggaagaataattcaaggaatgcataaacatctttacctgctgcaacagtatcagaaactgaacctgaggaatatgaataaccaacattaacaggttgatctaagaaaataactgaagcatttgaattccaagaatatggattataaactggatttaagttttcatcaattgcagatgaacctaattcaaagaataaaccagttaatgaagaacaacctggaccaccatttaaccaaaggacaacagggtcattttttggatcatttctactttcgaaaaaccaataaaagaaatgtttatcctcagattcaacatctaaataacctgaatattgtttagtatgatcaatacctaattcaccaggattagtttttttaactctcattttataatctgggaatttatcagtatttgcaacatggaaatcccaaaaattatcaggtttcttagaaattttaaattgaggttcagatgaaaattgtaaattttgaacagtatttgggaatttaagttccatttctgaccaagcttcaataattgaattatctaattcttcaattttttgacctgtaactaaagctgctttctctaagacagattttgcctttttaatagaatctggcaatttatcattaattttatcaccaattttatcgaatgcaccatcaaggtttaaaggattttgtaattgttgtctaaaatttgcatcaggtgaaattaaacctgcattgactgatgtcaatgatgcacaaagtgagattgctaaagttgaagttaatctcattgtaagtgtagttttttttattaaattgtaattttaattgtagttgtaactatagatgtaattgtatcaattgtagtcaacagatggtcccaaagcactcaaacagccactacttgaccaaaagaaaggaagaatgaaggtataaataaccaatacaattaaaaaaaggccagccaccgcagctgagcattaattatttgccctcataaaatttaaaatttaaaatttattaaatttaagaaaaccctcactgccttaattttgacacattctcttatcttatcttatctaatctaatctatagactacacacctacattacacttggattaccacaaaggggacattccctctcattttgatcaacaaaccatgatcggaaacatccaaaatgacctccatgtccacatcccattaatgttacaatattacccttaataggttctccacaatatgaacatccagattgttgcttatgacatctatcacaataccaaaatccaaattgactatcttcttttaacatcaatctatccttacttgattcatttattaatggtttcttgcaatgacaacagagggttttcactgatgtctttgtttgtccaatggttttgaaactttcatatgtttccgatgcaattcttaaaacagtggctgcattgttaaaatatccacttcttaataataattcatggtattcatatatccattcctcagcagtctctgctggaatagcatttgggtatttagtggcaaataataatgctaaggatgcacatgtgattatatcccctctttcattactatattgacatgctttctcaatcatatcactaggattccatggaacatattcatgaactttcttctgtaatttagtcttactgtcattacctactgacttctgatctttaacactttgactcttatgtgatccggcctcctctttattattggaattattctctttcataatacttgtaagttgactcttagtatctgatgttttacttaatctagtgtctaaactctgactaacatgaaatgatggatcatcatttgcattacttgtaagtgacattattattctactcctagtccttttcatcaatggtgaactagataatgataatggagatcccgatttttcatcatcaaaatcaactgaagatccagtaaatgagtacctatatggtctaatattattacttgctaatctgtttctaaatttattatcaatatcaattggaacagatactggttcatttttattctttgaatcttcagaatgtttaagtacatcatctgctaaaatttgatttttcgtgtgggaaatatcactttgtgtactattattcgtagcaaccagatcagttaaattatttgtattttcagaattgtcttttgtagttaaatcattatcttctgtatctccttcatcatcttcaacggcattctcatttatgaaactattagatttattaaatgatttatcatcataagatttattggaaacttcactacctaaattattaataacatcactctctgatccataggatgtacctaaattactttcactatgactaaaagaattttttctatcaaatgcaaaatttaacaatttattttcaatttcttcctcttctttaacttcattatctaaaataattgacattttaatacttctccaagtttgacaatctctgaaaaatccaacaaatgcggcaatcattgcattatattcacaaatttcaactatactatttacatcatcaatattattatccttaattatataattacttgaaaggagcttaaatttttcaatattattattgggtaatggtaaatgaattggtgtaatccatgatggtggtggtccataattatgtgataatattctaacttgtgatggttgtcttgattgcataattgtgggtctatgaaatttaaatgatgaagaaattgttggtgaaaatgcattatgtgttgaatttgacatttcataaagttgcattccatgatcaggtggtgtaattgatgaagtattattattattatgtattaacattggatgtgatttataatgattattattagtaaaataattttcttcatctccattatttttgtaaatattatcatcactattactattgctatgaatattattattaaaacttattttaatatcttcattctctctattttcaagttccttcccctcataatacgtttcgagatcattataactattacttctactttcaccttcaatttcctcttctttaacaacattatcatttctactatttttattaaatggaccttgaaattgaaacttatcctgtttaataactgttaaatcattaacttgtattggattccaacataatgaaccatttttaatattatttataaattctttttcctttaaaacatcatattgtattaatgatttatctttagaacatgtaattaaatgttttggagttctccataaaatttgagttatttgagctgaatgaccatttaatactgattttggtataaattttctatttaaattccaaatttcaacacttgaattattattaaagaatgaaattgcaatatcagtattcaaaattgaattattacctctacctttacaccattttgccttaaaaattggatctgatgtataaattgtatgacaaggttcctttgaatcattactatttgaatctaaattccaaacttgtaattgtttatctctaccacctgtaattacataatctaattcaggatgccaatcaattgttaaagcaggacctgaatgtgcattaattcttttctcccaagttgaatttttccttaaatcccatttttcaattacaccagaatcgaaaactgatgaaattatattaccctttttattattaaatttacaacatctaacagcttcagccataccattaagtgacatttgaggttttgaattacttgttcttaaatcccaaattaatattttaccatcttgagatcccgataaaagtaaataaggtgaaattctattaaaatcaattgaattaacggctcttttatgaccaatcaatgaagttttaattctattacctctatcaaaatgataaatattaattgagccagtaattgtacttgaagctaaatatctaccatattgttgatgaccaaatgataaatcacttatagtacctatttttgccttaccactttgtttcataactaattcagtttctaaacttatatcagtattagaaacttttaataattgtaaatttcgtggagttgcaattgcaattaaattaggagtttcccatgatttatcacatgctaaaatttcatttgatgattggaaatatgatctttcagtttcattaaaacttggttcatactgtaatgatggtagtaaagaatgtgaaaatttattttgattgggtatttctatattggttgatgatgatactgaggaatctatattcgtactattatattcatgattattattaatattattattattattattattattattattattattattattattactattattactattattattattactactattattactcataccaccattaagaaaagaattattataaagataagacattcctcttgacattgtaccactaggtcgtctccctgcttctgccaaatagatcggtgacccagtagatggtgaagtattatgagcaattgtagttttagaaggagaacttgacattaatcttgatataaaatcatttgaacttgatgaattattgttaatgctagacatgtgtttgtgtacactactattatttgaaaaattgatatttttagaattcagtgacccattagaattaccactactcatctataacagtgtactatactaaactgtctctacttcctctatcattcccaagattaaactgttatcaataatcccacaataaaattcatgtagtggtgaaataaggtaaatttaaagtggaaaaaaaactattacgtaatcccgacgcgtctgcttatttttataaaaattttaaattttcccactttacgcgtcagtggattatttgatcaagtctttattcatttcgagttttaatagaaggtatacaaagagtatatatacacacagaacactaagtaatgacagtagaggtaaagaatctggatatggaaaataatggggtaataacgaaacaaataccgaaggaagaaactactaataatacaattaaaatatacaaaccatcagaaagtgatatgcgtcattattatgataatttcctaccatttaatttaattttccaatggttaaatcattcacctattccaaatacagattttacacatagagaatttgcatttgaacatcaaaatggtgcttatcaacgttataattcatttcaagattctaatgaatttaagaaaaaagttgtaacaattaatccaacaagatttgaaattggtgcaatttatccaattgaacctaaaaatcgtaaaagtgtttctaaaaatttaatgaaaccaattagtaaagaattaataattgatattgatttaacagattatgatgaaattagaacttgttgtaaaggtacatctatttgtaataaatgttgggaatttatttcaattgcaattaaaattattgatattgcaattattgaagattttggaattaataatagaatttgggttttcagtggtagaagaggtgttcattgttggattagtgattcaaatataagatatttaaaggaacaaaatagaagatcatttattgaatatttagatatacttaatattaaaaataataaaaataagaaaggtattttcggtatgaaaaaaccttatcatccacatgttgaaagatcattagatattttaaaaaatgaatttgttgaaataattttaaaggaacaaggtacatgggataatattgatgcaaataaagatttaattatgacaatacctgattcgagattacgtaacgcattaataaataaatggaataatgaaccaaatttgaaaagtactgataaatggattgatattggagaaatttataaaaatttgaaaattaattcatttgatataattgattggaggaaagaaatgattttaacaatgttatatccaagattagatattgaagtttctaaacaaatgaatcatttattaaaatcaccattttgtgttcatccaggtacaggtaatgtttgtgttacatttgatcctaagttaaaagaatttaatccatttactgatgcaccaaatttaaataaaattttcacagaggatgaatttgattggaagaatacaagtttgaaagagagtattgaaattttcagtaaatatgttaataatttaattcaacaagagggacgtgagaaacgagaaaaacgtgaagctggtgatgttgatgttgatcagtcattagagttttgaatccttatcaatatactataattacccaaaagagtaattctcattcttatctcatgaaaaaatcaaaaatcaaaaaaaatttcaaaatattagaaattttcaatttctcacttattgtggcttgagtgtattaaatgtggctttcctctctatataaactataaactataactttcttatcttgattaggtatatttgcaacagtttctatattcaattaacattgtctcaatttccttatttggtaaccgtttatcttatccaattaaatgtttttaacttaaattgttatgttatattcccagtattctataaaactggtagcatatcctgatttagtagattatcttatgtatgcttattttaccttcttctttttttaacttaactcatcaaacaaaatgacaacattaggtagtattaattacgatgaagcaattcatttccacaatgatagtgatagtaaaactgagacaggtattttaactgtctctaaggaagatttagctaaaactgaattccctgaatgggcaccaacttgggatattaaacatgatcacgcttttgaaaatattgaaccttttaaacatattgatagaggaaattttgcagatccaacatttaaatcattgaaaattaatgatgatgttaaatttaagagagttacaccaaatttaggtttagaaattgatggattacaattaagtgaattaacagataaacaaaaggatgatttatcattattagtttctaaacatggtgtaattgcatttagaaatcaagattttaaacatcaatcatttgataaaattaaagaatgggggaaatattttggtccattacatattcatccaacttctggtgctccattaaatcatcctgaatttcatttagtttatagaagaggtagtgaaaatgaacaaaaaaaattttttaaggataaattacataatattggttggcattctgatgttacttatgaaaatcaaccacctggattaacattatttgcaatgttacaaaatagtgaaagtggtggtgatacacaatttataaatatgtttgaagcttatgatagattatcaccatttatgaaagaaaaaatcgatgatttaaaagttttacatacatccaaagatcaagcatattttgcaaaattaactggtggtattgaaagaaaagatccaagtgataatattcatccattagttagatatcatccagttttaaagagaaaatgtttatatattaataaatcattttcaagaagaattttaggtttaaaaactgaagagagtgataatttattattatttttacttaatcatattgaatcatgtttagatgcacatgttagaatgacatgggatagtaatacagttgttgtttgggataatagaactgttattcatacaccaacaactgattgggattcatcagatattagacatgcatttagggttacaacaattggtgaaagaccaattggtagtcaagaggaatatgataattggacacctgaattagaaaaggagaatattaaaaaaactaattattatacaaatctttcaccagctgaatattatgatgaagttattgctaatgagaattgatttctcatgtataggatgttaatcgctttactctttttttaacacttttttgtattttacccatatctttgttttgtatttatttaatgatttatcgtattccctaagtttatgcttatttttagttctagttttgattggtgggattgatgaaatattgctgatgcaattttttcacttattgttaatatacaggttctttatcagtttgtttcttaaattttctctactgatattattactatttctattacttactctagaatatagggtgattacatagagttagatactacttcctactacctttccagtactaactctatagtaacttcttagaagataataacaactcaaactatgatatcacaaagccaccaccacagtttcccagccttcaggaaccacagatcaacaagatgctgccacaataaaatttaccaaattttgacagaaaattcgctatttttttcaaattttttcaatttttttttcctttttcggagttttattattttgctatctggttgtaacggatcattatcatctcttgataatgaatattgttctagttcagtacactttccattttgacaagtgataagtttggaaagtttttttcatcttaaatagacttgaaaagtacttcatttttctgaaatttgaaatgtctaacttattccgttttaatttttgtcttttaattaataacaaaagcaaagaaaacaaaaatgtcaacacacgaatctgacatctctcatgataatgattcttcattaaaacttgaagatgaaaatattcatcattattctgacttaaaatctattagtgatgatgatttaacaattgatgaatcaaatgaatcaccagattctgcaaataatcctttccttaatccagttgttaaggaaaaatatttagcaatttatgaagatgcaaaatatgaatgtcgttttagatttgatgaaacttttagatggacaaagaaacaacaacgaaaattaacttataaattagattttcatgttactttattagcttgtttccttttcactgcattacaaatggatagaagtaatttagctcaagcagtttcagataatttattaaaagatttaaaattaacaactaatgattataatacaggtaatacaattttttatgtttgtttcttagctgctgaattaccttcacaattaatttctaaaaaattaggttccgatatttggattccaattcaagtttgttgctggtcaattataactttatgtcaatttaaattagatggtaaacaaagtttttatgcttgtagagcattattaggtatctttgaaggtggtttcattgcagatatggttctttggttatcatatttttatacagcatctgaattatcaattagattatcatttttttggactgcaatgtatgttacacaaattgttaattatttaattgcttatggtatcttacatatgggcggtgtacatggtaaaccaggttgggcatggttattcctaattgaaggtttaattacattatttattggattttgtggatttttatttatggttccatcaccagttcaaacaaagaaaagatggaatccgaaaggttggtttactgaagaagaagaaaaaattattgttaataaagttttgagaaatgatccatcaaagggtgatatgcataatagacaaggtttaaatttaaaaatgatttatcaagcaatttcagattggcatttatggccaatgtatttaattggtattgttgcatatataccagaaagtacaattacagcatatatgacattattattaagacaaatgggatttagtactttccatacaaatttactttgtattccatataatgtcttaaaaattataatgttattatcaacaacttatattagtgaacatgtttcaagtattttccttgtttgtttaattcaaccattatggggggttgtttgtgttggagttttaagattttggaaaggtagtttagttaatcattggggtacatatgttgttttaacaatttgtttaggatatccatatattcatgcaatgatggttagtgcatgttcaagaaatagtcaaagtattaaaactagaacagtttcatcatcattatataatatgtttgttcaagcaggttcaattattgcatcaaatatttatcgtacacctgataaaccattatatcatacaggtaatgcagtattatttggtttagcattagcaatgttcccaattttattaggtactaaatatttttattggtatttaaataagaagaaagatgaaaaatggagtcaaatgacagctgaggaacaagatgattatattaaaaatacaactgatacaggtagtagtagattagatttccgttttgcccattagtttactttagtttatgtattatctttatattattctcgttgtatgttcattattttataattaattgattttattcaataaatctgctaccaattgaagtaaaaattaaaaaaaaaagcattacgtaatatatcgctattaccttcccaaacccatcataaaaaacctatcattctttccctcgctatcacctaccgccaaatcactgataagaaaaagagagatagttcccccattcaaatttttttgacacatgtaaattatacttaatggaaggtattacatcttcacttgtacttaacggttaatttgaatttacacggcatcatttgtattacaatctattcccacatttttcatctataaataccccccctctatccccatatttcattcttattacttattcatatgtcctttcttagtaaaaacaagaaaacataatgtccttttcagaaccttcatataaattttatccaaataaaaatgcaactgttataagtgctccattctctggtggtcaaggtaaatcaggtgttgaagatggtcctgaacaattaattaaatacggtttattaaaagatattgaaaaattaggttggaatttaaaaaatgttaatccattatctgaaatggatactgataaaatgaaaaaggatgaaaatgatgtttacaataattgtaaaagaccaacaatggttagtgattgttgtaaattaatttataatgaagttaaatcttcttatgaaaaaaattctttcccaattacaattggtggtgatcattcaattggtatgtctacaatttctgctttcattaatacttatccaaatggtggtattgtttgggttgatgctcatgctgatattaataccccttcaacaactgaatcaggtaatttacatggttgtccagttgcttttgcaatgggtttagattctgaaaattggccaccacattttaattggattaaagaattgaaaacaaaggttaaaccaaatcaaattacttatattggtttaagagatgttgatgatggtgaaaaaaaattattaaaagatttaggtattaaagcttttagtatgtatcatgttgataaatttggtattaatgaagttgttcgtatggcattagaggcagttaatccaaatggtgaaaatccaattcatttaagttatgatgttgatggtattgatccaatgtatgctgctgcaactggtacacctgttagaggtggtttaactttaagagaaggtttattccttgttgaagaaattgcaaattcaggtaatttagttggtttagatattgttgaagttaatcctgctttatcatcatctgctcaagttcatttagaaactgttaatacaggtttatcaatcgctagatgtgctatgggtgaaactatcctttagtttcttaatacgtatagatgtatatagaattgtatcataagtaaataaatacctcgtaatgaattattaatgaaattaatgtaatcggtcttcctctccggtaccggaatcgccaaactgaaaaattcatgttgaaaaatttcaccaattatataaatttgactcatctaaagtcattgtaccttttctctaccaaaccaatgacagaagataagaaggaactaccgccaagatatgcaggttttatagctggtgttttctcaggtgttatgaaaaatgctgttggacatccatttgattcagttaaagttagacttcaaacttcaactggacgttttacaggtccattagattgtactttgaaaactttgaaaaatgaaggtattaaaggtttatataaaggatttacacctccattagttggttgggttatgatggattcagttatgcttggttcattacatatttatagaagatttgttaaagaaaatttttatcctgatgaaaagaaattaccattatttggacattgttttgcaggtttattatctggttggacagtttcatttgttgctgcaccaattgaaactttaaaggctagattacaagttcaatatgatgcaaagagtaaaatttataatggtccaattgattgtgcaattaaattatggaaattagatggtttaaaatctttatataaaggtttaataccaacaatgatatttagaacaaattttattgtttggtgggggtcatatgaaattttaacaaattattttaatgaaaatactaatttaagtaaatctgcaattaatttttggtcaggtggtttaagtgcaacttgcttttggataactgcttatccagctgatgttgttaaaaatgttattatgattgataatgctgaaaatccaaaatttaaaaaatattcagatgctgttaaatatgtttataatgaaagaggtggtttaaagggttttacaagaggttttgtaccaagtattttaagaagtttccctgcaaatgctgctgcattagctgcatttgaatttattatgagaatgttctaatattttagagagccatgaacatttatgttatgaaattaaaaatgatttagcatctggaatgttaatcatatgatactattactatattatttatttactaacctatttacttacttattttattatataaaactagaaatatagataagataaaaagaagaaacattatacaagtatgtcatcactatattaagcgatttcatagtgtttcaaaaatatttcactttcaatatgcatggcggaaattatacctttattaatatttaccaacacttgttcttctttccattttacaattaccatgtcaagtaataggaagaagaggctatcaataatagacttttttgggaaatcaagtgattcctcatcatcgtcttccaaaaacaagaaaggacatacaagatcatcttcatcttcaaagaacacttcgtctaaaacaactacagataataaaacaaagagacttacattcacaatacctaatgaatcgataattcatgaagattactctaaaatacctattcccttacctaaaaacagacctaacagaaacacagttcaaataaatagttcattaatttcatcaccggtacattctaatcatagtttaacaaatttatcaaataatagtaaaactaaattaactatatcatcaccagtttcaccagttattaagaatggactgtcccccaatgggagagatattacaccatcacgaatatatggtatgaatagtactcaaactacaccttcaaaggatagattagttagtaattctagtctttcatcatctgtttatcctaatgataatttgagaaatgtaagtaattctacattacctgaaattaatagagtttcatcatcaatttatccaccatcaactatattattcgataataataataatggattgaagtcaacaggtacgattaagagatcagatttattgaagaaacgtaaaccacctccattaccattagttattgacacaaatgaaaataatgaaaatgaaaataaagcacaaactaaatcacctgtggaaactataaaacattcagcaacagaatcatatgaaagttcagatagtgggttttctccattaaatttgattaatgaaaatagttttattaataataataataataatttaccattatcacaaatacgaagtttaaatccatctaaaaatgtaatgtttacgaataaaagtgttgaatacgatccacctgaattcatatctcaacagtacgagaataatgatgataataataacatacataaacattcaagaacattatcgagtattgaagaaattaccagtgcattggataacttccaattagaacatgaaaaatcatttgatttaactacgagtacgcaggaaactaatgataatagttcatatattgcaagtccaataagtgatagacatacaattgatctgaatatagacagtagtaaatttgatgaaagtgttgaatacaataataataatgatgatgaaaacgatcctggaatgtatgttaaagtaaaagatttaccacaagttgaaggtgaaacactggatgaatatattgataaactgaaagatattgcaactaaacaaccaaatgttagtgaagaacaattaactcatccaattgcaatgaaattaaaatctgctgatgtatctgaagcctcaagttcatcagatatattttatgatgtttctgaagctgtgaagaaatcaaatgaagatgttaagagtgttgtgtcgagttttcaagaagtgctaccacagaaaataccatcaaaagaagtaccaccacaggaaattcaaacatcacagaaaattccaccacaggaaaatatcacaccaacagaagataacttcaatggtgatgatttcaattacatatcatttaaggagaatattgaaaatggtattaatgaaaatggtataagtgatgaagaattcaataatgaagaagattttattgggccactgaatgattcatttgaatcatttgttaaaactataaatgccagtgataatacgaatgatgaacttgatcaatctaatgaaattaatgaagtttcaaccaatagttcaacaggtggttggcaaaggtatagtagtgcaactaattttttcagtaattatgatgatttaaataatgataataatgatgatataatctatgatgaaaaaaatttaattattgaaccaccaaaggatattactggtgatgaaactgatgaaaatgtagttacaccaacagatactgaatatgttgtgaaagattctacaccacagagagattttgatcttgaagatgaattagataataatattgttgaacatcaattagatagtaatagtatggatgatttttttcctaaaagtgaaaatgatgagtatgtggaggatgatagtaatgaagatagtagtgatgatagtggagaggaagaacccggtgaggtatcaaattataatagatataaggaaatttcagatagtccaagtattgaacaatctgaggatgatttcctggaattttcaccaaaacctgccagtatttattctggagaaaacaatggttcacctgatttatatagacaaaattcaatgtttaccaaaggtgtgttggagaaaatgactggtggtgatgcaactgggactcccgttgttggtggtggtagagaacatttgaaagttgtcaataatgatgaagaagaagatgatgagaggcatggtgatgatgatgatgaggatgaggatgacaattctattagtccgagtaattgcgaagataaaagtgaatatgcatacgataatatgattgatgaagaagaatataaaacagcaccaatacctgatcttgaatccgtaatagataataacgcacaatacaatgatcgtttatatattgatgataatcaaataatttcagcatatgatagaagagaggaagcagttgttaaacctattgaacattctaatataattacacctgcagtaccaatcacgggatggaatacaaatatgaattcaagaaacaaaagaccaccacctaattttgcaataactggtagaagaagtagaggattatctgagacaacggctaatcctgaattatttaccaatggtggtatcaagaatgaacctattgaaacaccagtatcttttactaatgctgttactacttctaatactgttaacaatggagatgaaatgataattagtaatgaggaatcacgtaaaggagagaaatgtacatatattgagaacttacgaaccaagggacgtaaaacgactattactactaaaccatcattacaagtattaccaattgctattagacaaaatggtagtatatcacatagaaaaattccatcacaacaattatttagaactagattaagatctcataaacatattacagtcaaaccaaagactagaatgctagcaagtgaaatagatgatggagaattacctgatgctacaaaaatccatagtggacaacgaactaaggttccaattcatccagatgctgcagttatagcagcaagtgaacaatttgcgagaatagccaatcaacgtagtaatggtgcaatgacaaataacagtggagaattgggaaggtttaatagtgttatgagtgttagaccacattacggagacggtatgaagctattcatcaccaatcctgacagtgatgatgattagtagtagtagtagtataagtatgtataatattacgtaacaattttgagactttgagactttgagatacgtggacaatttcaaggccaatggtcaaattgcaacatgttttgattgatttacatgcatgttgtttcttctagaatttgagttgtttttatcttcttttacgattaagttactgtagtcatgtcggatgctgcctacactttgatctatgaaccaagtacttcatcaaaattcactatcaatgagtttaaaactcaattggagaaaggtgatgatgaatccaaaattgtttcaatgagaaatattttaattacaatgattaattcagattcaatgcctgatttattaatgcatattattagatatgttatgccatccaaaaataaagatttaaaaaaattattatatttttattgggaaatttgtgataaatatgataatgaaggtaaattaagacatgaaatgattttagtttgtaatgcaattcaaagagatttacaacatccaaatgaatttattagaggtaatacattaagatttttaaataaattaaaggaaccagaattattagaaactttagtaccaaattgtagagtttgtcttgaacatagacatgcatatgttagaaaaaatgcagttttcgcaatttattcaatttttaaagttagtgaacatttaatacctgatgcacctgaattaattaatgatttcttaaatattgaaagtgatgcaacttgtagaagaaatgctttcgtttgtttaagtaatttaaatagggaagcttcattaacttatattcaagaacaaccattagattcattagatcctttaattcaattagcaattattgaatttattagaaaagatgcacttaaatttaatgatttaaaatctcaatatttacaaattattacttcattattagatataagtaatactgctgttgcttatgaagctgcaactactttaagtgttttaagttcttcaccaatttcaattaaaaatgctgcttctaaatttgtcgaattagcaaataaggaaagtgatataaatgttaaattgattgcattagaaagaattaatgaattacatttaaataatgaaggtattttagatgatatttgtttagatattttaaaaattttatcaactccttcagttgatgttagaaataaagcaattgaaattggtttaaaattagtttcaaataaaaatgttgatgatgttattaaattatttaaaaaggaattattgaaaacttctaattcaaatgaagataaaatcactgaatatagacaatcattaattaatgcaattcatttaattgcaattaaatttcatgaaattgctgcaaatgttgttgatttattattagaatttattggtgaattaaatactacttcagctaatgaagttattacatttgttaaacaagttattgaaaaatatcctgatttaagaactaatattattaataaattattaatttctttatcaaatgttaaatctggtaaagtttatagaagttcattatggattttaggtgaatattgttttgaagagagtgatattcaattagcttggaaacatattagaaatagtattggagaaattccaattttatcatctgaacaaagattaaatggtattgaaaatgatgatgaaactaatgaaaatacaacttcatctacaccatctggtccaaaaattttagctgatggtacttatgcaactgaaagtgcatttgatacacctgaaattaccaaatcaactaataataaatcatccaagacaccaattagaagtttaattttagatggtgatttctatttagcatcagttttatcatcaacattagttaaattaattttaagattaaataaagtttcagaacgtaaagatttaattaatgcattaaaggcagaggcaatgttaattatggtttcaattttaagagttggtgaaacatcatatgttaaaaagaaaattgatgaagattcaagtgaaagaattatgtcatgtgttagatttttaagtgaagatcaaactgatattaaattattagaagaagcattcttagatgatacattggaagtttttaaacaacaagttgaggaaactttagcaaatgatagtaataatgcagcaaatattgcaaataataatttaaagatagaaaatgttgatgaaccaataacttttagacaattcactaacaaggatattaaaattgttgatgaaaatgataaagaattagatgcagttcaagaaggaactaatccaaaggaagatttatcatcaagattaaataagattgttcaattaacaggtttctctgatcctgtctatgcagaggcatatgttaaagttcatcaatttgatgttacattagatgttttaattgttaatcaaactactacaactttacgtaatttaagtgttgaatttgcagcattaggtgatttaaaagtaattgataaaccaacaagtgcaaacattgcaccacatggatttcatagagttcaaactacaattaaagtttcaagtgcagatactggtgttatatttggtaatattgtatatgatggacaacatgcagatgatagtacaattgttattttaagtgatgttcatattgatattttagattatattaaaccatcaacatgttctgaaactcaatttaggaaaatgtggaatgaatttgaatgggaaaataaaattagtattaattctaatttaacaagtttaaaggaatacttggatgaattattaaagagtacaaatatgaataatttaacacctggttcagttattggtgattgtcaattcttatcagcaaatttatattctaaatcaactttcggtgaagatgcattagctaatttatgtattgaaaagagtaaagaaggtttaattactggtcatgttagaattagaagtaagggacaaggattagcattatcattaggtgataaagttgcagcagttgcaagaaagaacaataccgttactgtttcaactgtataattataattataagtaataagtatagtaaatagaccttttatagcgaatatttccattttggtaaatcttacgtcttttgacaacatgttatgtccaatgtttatcatctcttcaattcactttcttttctttcgacgtacagattatactcagtaatgaactatataaatacatttcgagaggtttatcaatacgatgatccattggaatcattaaaaccttatgtagaaactttcattaaaccctacattcctcaatcattacagccatatgagattatttcaaataatttacatacattattatttggattatcattatacacaacgttatttcaattatcaaaaatattcctgtttttcaatccacaaatcactaaggcactgaaaagtgaaaagaataaattagattgttgtgttagaattgtttcatttattcaagcaattattatttgctttttaggtattccagttttcaataataaatatttgaatattgatcatgtatttgcaacaactccatattcaaaattttatacttcaatggcattaagttattttatttgggatacaataatctcaacaatttatgttaaatattttggtgttggatttttaattcatggaattgtttcaacaattgttttcacaattgcagttgaatataaatttattcaatattattcagcaattttcctattatttgaaatttcaactcctttccttgatataaggtgggttgggttaaaatttaatgttttaagtgaaaatgttaaattaattaataatattatcttgattttaatcttcttctttattagaatttgttggggttggtatcaagttttcagattaggtattgatttatatgatgctaagaatgaagctaattttactacaattggtgcaataatcattttaagttgtaattttatacttgatatcttaaatgttttctggtttagtaaaatgatgacagttgcaattgaaactttaaaaggtatgttaggatttaaagttaaaacggatgaaagtaagattaaacttatgtaagtgttcctatataatacatatgatactactacaataaatttttacatttagagtaattagggttagataatttctctaatccgattttaacatcaagtttaatatctttaattaatgcttcaatacctgtatagtttaattcaggacgtaaataaccacaaataacacttgatatatgacaaccatagaaactatcattaaattgatgaattatgtaaatttcacaagttttttcattattaccataataaggattccatccaagtgacataaccattggtaaaacatctaattcttcatctttaagataatgaccatagtttaattccactgatgatttaccatctattctctctaccttggtagtttcggtattgtcattctttgttttgaataatttagcaaatccaaaataaactccaggttcaagattgtttaaaatttcattatctttaacgtttatattagcagttgggaatccaagatctgatgatccacgtccaaatcctggtataacagtgcttttattaagtaagatggggaatggagttactggtgagtcaggtatttgtggtctttccattggttattgaaaggaatgcagtatccattacatgaaaaaacatttgtgttgttacatgacaaattaaactggttttctataatctataaaataatacaaaaatattgacacagttcaaggttctaagttagggaatgacttcatttgaccattcatccattcttcacctaataacttcaatctaactctacttgctgatgatttaccatcaactgatgtccattcatttacaattaattttaataatttaatactttgtctaccataagcttgtaaaaattgtattgcacatgcatcccaccatgcaccaactatggtaaaatggatttcatttaattgatttgttggtatatctaataatctacttaaaaatatccatgaattagaaattggtaaggggtgaacaatttgatcattataaccaataaatgattgattgatttgtaatctcgttataactgaataaagagttgaaatacctgataatctttcattatattgaatttcattctcccatttattagtagtttcatctctattaaatcctaaacgtattctaccctcttcagtttcatttgaacatgaatatccaattaagaatggacattttgtataaaattttgcaaataggaaatattgtaaatcattgaaaattatcattaaattaagtgttaattttgccaagggtaatgaagattttggtttaactgaaacttcagtctccgcttgtgaaataattgcatctgatataaaatttaaaatccatttaaatgctaattgattactctgtgtttgtttaataagttcaattatttcactggttagtttactcaattgattttgactattggttaattgaccaaatttaggattaatcttacgtttatgaccaccaacatttttctttaattgtaaatcatttttaacgggtaataaaatttgagattcaatatctttgatatcttgtaaatatttattaaactctgtctcaatttgtgtaggtctaataattgaattagtttcaagttctttaagtcttttaatttcatcttccttttgtttctttaatgcttcctgttgttgttgtaatttcaattctttctccctttgtaatttttcctctctctccttcttctccctagcttccttttcctgttgttgtttgattctcaattgttcttcctcaattctctttctttcagcttcctccttagccttacgttcggcttcttccttagctttacgttctgcttcttctctagctattctttctgcctcctccctagctttcctctctttttcttcaataattctccttcgttcctcttcctctttacgtattctctcctcttctaattgaattaaacgatccacgctatctttatgctgttgacgataatttaagtactcattagtgaaatattgttctaaattgggtaatttatacaaatgaacattatcctctatattttccttacttcccttactctgttgataatccttcctagtactattctccctagtggaagtactatttgatccaataacgatactctcagccagatcagcggctctgttgaatctctcagaaagtgaacaagagtccaaaaactgcgtcaaatcctccaaagaagagacactagtgacttccctaccatccaccatttcaccaccatcactgtcactggtactgtcactctctacgtgctcatacactccaaaacgcatctatccaaaggaagaacccactataataaaccatcatatatccaacttacccgccctctaaataaattttccattttccaccttcaactgcttccatttcttatacaagatccttttaattctttcttgtagatcttcagagaatataacccataggatctccatagtatacaatgacgttggtatcggtacgtagtttctcatcatctgtttcattggggaaggcggcttgtgcacaagttaagccagttcatcataaagttagaattattaaaaaaaatctttcaccaagattccctgaacttaaatatccaagtcatgatattaaatcaccaaaatttagaccttatttaactcatttagatagagttgatcatcattatcataatgttttagaatcagatttattattaataggttatagacatggacaacaaccaatttatggtaataagagaagacattgggatatgtcatctccatatcaaattaatagacctttaagaaaaccaaagggtcaaattgttccctcacaaactattaatccaagagatagtggaaatattgctaaattacaaagtatttcaatcaactgttttgttaaagatgcaaaacaatatcctgcaatggcaattggtgcaacattacaattacaacaaataactggtgttaaaccaaaacctatttatgcaaagacaaatgttccaaattggaaattaagaccaggtatgaaaatgggtgctaaagttgaattatttggtagagatgcatcccaatttttatcaactttaacagaaattgttttacctagaattggtgaatttaatggtatatcaaatagagctggtgatagatatggtaatattgcatttggtttaacttctgatcatattaaatatttcccagaaattgaattaaatcaagattcttggccaaatttatatggttttgatataactttacatacaactgctcaaactgatgctgatgctagaattttattatctggtttaggtttaccatttgttggaagtgaaagaatcccaaaaactttattggatgatcttaccgttcacccttatgaaaattagtattgtatataatatttatatttatatttagactttatatattattaaaacatgtaaataattatactttagggtctttacaagtaaaaataaattttcttggtattctaatattttcattattttcatgacataataacatcatgttaggtattataataattaattctgtttaccagtaacatcttctttcttttcaaacaatggcattacaatcactttggagactagtggggaagtctcaattgattcaaccctttactgatcaatgtcttatacctcataattcatcaagtgaagaaatttgtcgttatttaaaggataatgttcaaatatgtaatgatattacaaatttatcattaaaatattattattgttccaatgttaataatccaatcttatccaatataatcctatggttaattatctttatatcaattggtttattatttattatattaggtttattagcatctgattatttagttccaaatatgtctgcattatcagattttttaaatatggatgaaaaattatcaggtttaacattattagcatttgctaatggatcacccgatatattatcaacttatattgcaatgaataaaggtatgacaacaatggcaattggtgaattattaggttctgctaattttgcacttactgtagttatcggagttatggcaatttataaaccttttaaagttaatcaaataactttcactagagatttaataatattttcatctttattgattatttcattaattatcctattcgatggtacaataagtatttttgaatcaattatattatgttgtctttacattttatttattatacttaatatatttttaccaaatcatgaaaaatatgaaaaattagaatcaagtgatgaagatattacaattgatgaacaaaatattaataataattcattaacacaggttaatttatcaacattaccgaatgatgaaattattagaaataacaatagattatcagttatatcaatgaataatgatgataatcttgatagattaagtactacttcatcagattctaatgcaagtatgaatgattattattttgctcataatgtcgataatttagatcaaggtaatggttataaaattgcattaatggattcattaaaattagcttggttatgtaaaaggaaaacatctaggatagtaccaccttatgatattgaacaacaaaataatgaagttataccgttaaattctaatcaatcatctcaaagtttacaatatattgtacgagatgatgatgaagaggaagaagaagaggatgattatgaaaatgatgatacaattaataatgatataactaattcaacaattacaataaatacagtacctaatattaaaactacacatacaggcgatagtgaaattgaaaatacaaatacaaatacaaatacaaatacagatactaataatatggacccaccaggtaaattggcatataaaaataaatctcatagtagtacaccaatcctttcacgattaaatagtaagaaaagtaaagataaaaatgattatcaaatattgttcccatcaagacaaaatagttcaattaaaagatttggaagttcattaaagttaaatactaatttaccactttattcacaaagatctacacctcaagcacctgtggataatgttacaccgtttaagggtaattttcaaataattgatgaagaagaaagtgaagtacatagggagatacctaatgattctcccattgatcctatgagtagtaatgttaataccttatcaatacctgaaaatacggttaatgaagattcaatcaattctattaattcaatcataccatatattgaatatcagaaaactgaaaacatgtttgcaaagattttcccaattcatattttcagattatctacctcatttggtgaaaaattattaagtattataattataccattctcaacaattttcaatataattataccacaaccattaccattagaacttaatgaagaaatttataaacatgaattatcaattagtacaaaattattccatttacaatcaagtatattagttttacttatgtctgattttgaaattaatttaataataattttattaatgattttattcccaactatgtcaatcgttttccaaaaactttcagttaaatactacaatttagttttcccaccaatttcagcaattttcggattcctaacagttttaaaacttataactttaactgcatcaataatcattcttttattaaaatatttagctataatttactcaattaatgaatccatccttggattgaccattttatcaataggtaatagtattggagatgttgttacaaatttagcacttgcaggattaggtcgtcctttgactggattacatgcatgttttggtagtccattactttatatattatttggagttggagtttgttcattaattattcaattatcacaatctaagaatacaattgaatttacagttgattcaagtttaataattacatcaattagtataatttcaatgcttattatgtatagtattattttacctattaatggatggacatttaagagatggatgggtgttatcggtgtggcagtgtggtttattgtaacttcattcaatgcaataattaacggtgttaattgagtatagtataatagaatataaaaaccacagtttatatccaccacaaccaccacaattgtggcttaaatgaaaattattggaaatttcaaaattttttttaaaatgagatgattgtcccaaataggtaattttgatatctctgataagcaacttatgatgatcatggtatacagtgcccagggtataaatactatgcaatggttctttattttatactatttgctctgccccctggtatatcttattcatatcactgcacaacactcagttagcaaaataaaatgtcagttttaactagaaattatagagattcatcaattcatttccaaaaagatgttgattcaaaatcaactgatggtattttaactgtttctaaaaatgatcttaaaagattaaattatcctcaatgggcaccaacttgggatccaaaggatgatcacgcatttgaaaatattaaaccttttaaacatattgatagaggtttatttggtgatgaagaatttaaatcattaagagatgttgaaaatactgaatttaaacatgtaaccccaaaattaggtttagaaattacaggtttacaattaagtgaattaaataataaacaaaaggatgatttagcattattagttgaaaaatttggtgttattgcatttagaaatcaaaattttaaaaatttagaatttgatgaaattaaaaaaattggtgaatattatggtccattacatgttcatccaacttctggtgctccattaaatcatcctgaatttcatatgacatttagaagaggtgatagtaaagaatatcaaagagaatttagtgataaattaactagtattggatggcattctgatgttacttatgaaaatcaaactcctggtattacatttttcacaatgttacaaactggtgaaagtggtggtgatacacaatttttagatatgtttgaagtttatgatagattatcaccattaatgaaaaagaaattagaaggtttaaaagttgttcatacatcaaaggaacaagcaaatgcagcaaagcaagaaggtggtattgaaagaaaagatccagttgaatcaattcatccattagttagatatcatccagttttaaaaaagaaatttttatttgctcatagaggtttttcaagaagaattttaggtttaaagagtgaagaaagtgataatttattattatttttatttaaacatacacaatcatgtttagatgcacatgttagaatgtcatgggatgaaaatactgttgttgtttgggataatagaagagttttacatacaagaactttagattgggattcaactgatattagacatgcatttagagttacaacaattgctgagagacctgttggtagtttagaggaatatgaatcttggacacctgaattagaggaagaaaatttaaaattaaaagattattatttaagcttatcagctggtgaatattatgaaaaagttattaaaaataattaaactggttttaaattattaatagttccttttcataatcattattttacattcttttatttttagtttacaaaattatataatcattatataatatattcaaatttgggttttttaaaaatattcacattcccaaccatttgggattttcttatcttccaatattgtaggtttattataaaaactcataaattgttttctagcctttaaataattgaaagattttttattcttatatttttcaaaaactttcgataatcttgatacagttattgatgaataactaagcatttccatgaaaagataatcaaattgattctctaattgttgatttttcaattttgatatttcagttattttagaaataattaatttttcaacatttgaaggtaatgtaaaatgttcaatttcaattaatttgataaataattgataattatatggtaacaattttaatccctcgtgtattattgcctttgcattatcaaattctaatgttataatgtataaatcaataagtctaattctaatttttaaattattaatagggttcatgtaaagaccattaattaagattgattttgccttagttatatcattcaaattaagataataattggaatatttaatccaaaagaaatgatattcatttgtcactatcaaacatctattatataatgtatcaatttgattaaaattatttttcaataaattttgttctttatcctttatggctacttttagatttaaattttcaacatattcaagatatgaacgccatgtctgtaattgtaatcttgtaagttctctatgaggtatgtaataattaatacctaattttttctcaaaattgtaaaatttccaagaatgaaattgtgttgtgatgtataagtcagtaaattttttctttaattctaattttaattttttaaagttattttcattaattaataaatcaacccatttaaaatttgttaatttctttaaatctgatgatgttataatatatttaattgattttaaatcagcattttcaattaattttaaataaattttaaaatattttaaatattgatgttgaggtacttgaattataattcttaataataaataatattcatgaattaaatttgtatcatttaaaaatttaagatatttatcatagaaaattgatgaataataatgataacctattgaaattctagccgtttcaaaataaggtaaaagattttcatcatttgggaaaattttaagtaataaatcaagataagtattccataataatatggaattgggtataattttcaatgatcttttaaaagtttcgattgatttagctatattattgaatttgaaaaaccaacgagcataattaatccagtattgttctaaatatggatatttaaccaataaattctcgtaagaaagtattattaattttgatgaattagtactttctgatattttaataaagttttcccatttaatgaaatcatctgagtgattggctatatcctgagcagcaatagaccacttatcgggtatctcagacatgtcaatgtgaattgtactaagagaatgtcttcttctaatgacttgtaaagttttaaaatcatgataataataaacaagaataataatagtcctcatgtaaaaggtcttacacctgattacgtaacgtcacgtgactgtatgattttaaaaaaattgggaaatttttcaatttattaattaataggaatggcaacttggttctttaatgatagtctcttgtttctttcacaatctttgagtatacaatgtcaggacgtacactttataagaagcttataacctctattgaggaaagtagtaaatcagcacatttagcacataataaagatttattaaagaaacaagatgcattagttcattatcgtcgtatgcaatatatgcaagcaggtaaaacattaacaactgaggatgatagtaaattagttgaagaagttaagaaacaatttgctaatgagataccaaaagttgatatatcaatggtggctcatcttgataaagattcattacatccagttgaagtggaacatattaacaatttatcacttttccttgattcacagagagaatatgttgccctattggagagatacaatccaggtatcagtatgaaacaaacagacaaggttaagaagacagctagaagagttggtcttgatgtacctaaataaaatgagccataaataaagtaagtattcttatattatatagacgcgactctgtacatagtaaaaatttcagtttccattttaaatttcacttagggaaaaaaattttattttccaagacatgaatttttcactcttagaagtagtagtagatactacacttctttagacaacaatcaatatgggtaaatctgaatctgctgactctgttgacaactacgatcttaaactcccttacgttttaccatttgctcaacctttagcaaataaaaaattaaataaaaaacttctgaaaactgttaaaaaagctgcaaaggctaaacatgttaaaagaggtgttaaggaagttgttaaagctttaagaaaaggtgaaaaaggtttagttatcattgctggtgatatctctcctgctgatgtcatctctcatatacccgtcttatgtgaagataatggtgttcaatacgttttcattccttcaaaggaagatttaggtggtgccggtggtacaaagagaccaacaagtgttattatgattgtaccagcttctgataaaaaaaatgattataaagattcttatgatgaaatatcaaaagaagttcaatcattataattataattatgtgtgaacttttaactacattttcaaaaaaaaactttctaattactatataaaaaaatcgtacattatttatatacaatatataatattttaaactattaggtataatacaatcaacaactctctatttgaaatatcactccttttttaattgtgctctaacccatccttctaatccaccttcaattataatttcttgtaaattagtacctaattctccaactttattagttaaaacaatttcacctttatcattcttaattgtaacaatagattttggaatatcccattttaatgtccatccagttcttcttgttaattcactttcactatctttaaattcttttcttaataaattgattaattctggtaattctaatgttaataatgcattattaatagaattacgtccgaaaatattactaaatgaacctgctgcaactaatttaatatctcttgctaaaattgcagttgctgcttgttctcttgatgaacctgtaccaaaattaaaacctgaaacaataatatcaccagcttcggtcttagaaccaaattcagaatcataattttccatacaaacttctgccatcttctctcttgaaacatcatcttgatatgtatatttacctggataaataccatcagtattaacattatctgcatcacagaaaacaatctcaccttcaatactttctgggaatccttctaatgtacttgatgctgatgaaccttcagatacatctgttgataattcatcattctttggactattatttataactgttttcttaacttcattactctttttacatgattcacctaatacttcctctggtgatgcaatcttacctaaaactgcagatgctgcaacaacttcaggtgatgctaaatatgctaatgcatctttggaacccattctacctttgaaatttctattagttgcagaaataccaacttcaccttcttttaataaacctgcacctaaaccaatacatggaccacaacctgcaggtaatggtttacaacctgctttaattaatgtttcccatgcaccatctaattctgcatctttttgaacttcagatgatgcagctgcaatataaaattcaatacctggtgcaatcttattatctttaacaacatctgctgctgccttaatatcagataatctagagtttgtacatgaaactaaatatgccttattaatcttaatgtcttgctcacttaatttatcaactgatgtaccaattttaacagaatttggacctgaaatatatggacttaaagttgataaatcaattcttaaagtttttgcatagaaagcatccttatctgcaactactttattattaattaatttttctaatgtttgattattaattcttggatgatttggtccaactcttaataatcttttattataccaattaattaatgtatcatcaattgggaaaacaccacttaatgccccccattcagttgtcatattagcaattgttaatctataatcaattgataattctttaactgattcaccagtaaattcaattgcatgatttaaaacttcatcattattaaataatccacataatgcaacaattatatctttacctgatgtaccctttggtaatttaccctctaggataacattagcaacaggtggaatttgccaccatgtttgaccagttgcccaaattgcagctgcatcagttctaacaactggtgtacctaatgcaccaataccaccataagtatttgaatgagaatcagatgcaacagttaaattacctgggaatgcataaccttcctcaatcataatttgatgtccaatacccctacctgcaggatagaaatcaataccttgctctttagcaaaattttcaatattttcatatttttcaacattcttttcactcttattttgaacatcatgatctaatgtattaacaatttgtctattatttttaacctttttagcacctaaacctttaaatttaagtgcaactggccatgaattatcatgagacataacatgagcgggactaatagagacataatcacctgaatgaactaatttatttgctggtaatccaactgaatatttttgaacaattttttcaattaaattttgacctgcaagtaaatttctactagttgcaaaagttctagcagatctttgaattcttattctagtattaatactaaacatcttgtttgtataaaagtaatgagaaacaaaactataacagaaagaaaataacttaaagaaaaccaccaatgacagtgaacttattaacaacttcaatcatcattatgactcaatgaaaaaaaaaattggaaatttctgaaaaatccgccatcgttgacttctccgattaccgtatcgggtaatcaccactttaaccgcgtattttcacagggtcttttcttagtaactttaatctataaaactctttacaaactctttatacaaaactattcactaagacggtaatgatcataacttaaaatagcttccaataaaacacggaatccagcttctaactcctcaggttcagtatgctcacatggattatgagaaacaccatctttacttggaacgaaaatcattgcggttggaataactaaattggttgcacatgaatcatgacctgcaccactgaccattttatgttttaaatcttcaccaacaatattaattgctgctttatcaataatttcaactaattttttattaaaatgtgttgcaggataaggatatggatcttcaattgtgtattctaatttaactccattacctgctttatttaaacatgcagtttcaataacttccaaacaacctttacgtatatttactaaaccttcgtctgtttcatgtctaatatcaagcacaaaatcaacatcaccagggataacattaacaacatctggcaataaacttaatttagcaattgatgctaaacctttaaattttttagcaacttcattaattccaacaattatatttgcagttgctaataatgcatctcttctaaattccattggggttgtaccagtatgttgtgacatacccttgatattaatacttaaccaattatatgcttgtgcacctgttaaaacaccaatttttttaccatatttttctaaaactggtccttgttcaatatgaatttcaaaatgtgcatgtaatgggttagccttatatgaacattcaacatcacctaaatatttaattctctttaattcctcatagacagtggttttattatcataaatatcctttaatgcataaatttcctcctttgttttaacacctgcccaaacacttgaagccattaaactcattgggaatcttgcaccttcctcattacaccaatcaactaatgtaattggaaaatttggtacaaaattattagcctttaatgttcttaaaacttgtaatccacttaaaactccataaataccatcatatctacctcccgttggttgtgtatctaaatgagatcccataccagttgcagcagcattattattcttacctggatatgttgcaaagatattaccacattcatcaattttaattgtacatcctaactttgttgtttcttcaatgaaccaatcttttacttgtttatcaatatctgataatgctaaacggcaaacacctgtttgtgttggttcaggtccccaaactcctttagctccaaattgatcagcagtggagtgaatagtttcaactaattcctttgaattaattttaaaattttgactaaaagttgtaactgtcatttcttcgattgtttatttttgttttctataaatattatatatttctttaattaaattaaggcgacatctacgggtatttatatttaaacagcaaagcttatcattcatgacagatgatctctcaaatcggcaaaatgttatctgcaatttcccttttaggaaataagctcgcttgaaactggccgcttagtcttactccgaagaatagactaattaataccgtatattatataccaaattacaacccgtatttgtctgggtcttcagcattgtactcggcaatcaactcatctcgggatagtgtattcataaaagcattatcatctgcaaaagtgtaaatttgcaaaacttcattccaaaaagcatcaacatttaaatcaagcagacaataaattccatcttcaacatcttccttaacagattgaatgctaccataatttgaaggttcaatactaatttcaaattttcttctcttatattggaaatcaaattcttctgtaatattattgaattgtaataatgccacaactgctactggatcatgaataactgggcctttataatttggtttattcaatgttaacatacgtttattaaatgagtctatcaattgaaacagcattgctctaaaatttgatgttgtttcaactgatttacctttcaatactcttttttgaatttcatcagtgataaatattttttcagttatatctaatgaagcttgaattattcttgatgataaaacagaatcttcaataattattttagctgcaaatggatcacaataataattaaattctgcattattatttacattaaattttgtaaaccctccacccattatagataaaaatttaattttactctttaaatgtggatactctttgaaaaacactgccatattagttaatggaccagttgcaataatatttattaacccttcataagtttctatctgctttgctaaatatgggaaaaagtctttattatccttaggtgtcattcttgatgctaataataagttagatccgtttaaccccgtttctccatgaacatatgatgcattaacttctttataattattaagtgggactgtttcacctgggaatacgggtatatctgttttattaagtgctgttaataatcttaatgtatttgaagttgtatattttaatgaaacattaccatgaactgtggagattcctaaaagattaaaatatggagagtaagttgcaacaattattgcaactgcatcatcttgtccaggatcacagtctagccatatcggtattggttgagatattgtcatattagttattatctataaattcaagaataaataaagatataaagaatataatcaaccgttgatcggacaataacttgaataatctgtcactgtgacattgcaaagaggcttccatgaaaaaatgcggggacggagtttccgctttgttagctattatatgaggttttttatgatgaaactttctttcacaggaaattattcagagtgaccacaatcaatcgtggtaataaactagttgtctttgtaaatagtaaaacagaataccttcagactgataatagaatttaaaaagagatctatagaagaggaacaactataaaaataagtatcaaaaaataaatgcgcaagccaggaatcgaaccaggggctcaacgatggcaacgttgaattttaccactaaaccacttgcgcttattgtttttgttgttgtattaggaaatcctccaagctgttgtatataaaaatattacgtaatcaacttaagttggaaaagatctttgcaatacaatgtaaatttatagttgctgtaagcctacttaatactactttgttggtaaaactggtatgtgagtagttagttcagataaaacttgattgtgttttatcaaaaactctcattttttaagatgacctgcataaaagacctaatgcttgttaaataaataccatttaaaattattaatttcattacaaaccagctcgatttaccaaaaggtagaatctataatttagttctgcatggcattacagtgtaaactaaatcattaatttaataactcttataccaattgattttctttcccaagtctccttgatttaatctgttggaatctaacctttctttgtgcaggattcatctttacaacaacaacgatattaaaggaacaaactatatgattcattaaaataacttaaagtatataattcattaaaataacttaaagtatataaaataacaacataaaagaaatattaacaaaccttggaattcttcgttgtacttatactaagaattccaactttgactataattttttttctgattttagagcaatacttaaatatattattggtccttcgaggttcaacttaataatacaatctcattgtttattattcaatctggcctagagttaccaatgtcaacatcctaccatactcaaaaatcaatcacatcattctgtaactacttataatgttaccagttttatcactgttatctttaattagatcctcctccacaacatcattaaaaatatgcttaattttaattatctcctgttgagagacattcttttttgaacattatctttgtcatgtgcatcactatttctaccattttgatctaaatttctataaagtaactgaccaatctcattatgtttcaactgtagcataatattttggataattaaaccctttcaataactttggagcagcactgtagttcttacccatatatttttgacacctctaataaaccagtagaaacttaatatatcaaacttcactacttgactatgtgagtaaaataaactttttattctgaaaaatgaagtataccaaatttggatgcccttttgattgacaaaagaatctgtatggcatccggaacataatgaacattgtgtagagttatttaataaccagaaactgggtaaactaatttaacccttccaattcccttaacatctaaagcatctttagcaataccaaaaatcttaccactaattattttaaattcctcaaattgaactttatgggtacttatatgagtatttaaacaactatccagcaagtaatttaatgaatctgttaaggcaacacttagatgccgtccatgcaaaaccactagatgcagatacaaaaagaccaggaagttaacatcttgagcatataatttcatctaaatttctttcaaatgatattcttccaccattgtttcctgtttttcctgtacatgtaaacacttgagagttgttagaaacagtgggggtaaaatctttaagagcaacttcgacagttgaaagtggtaaaccaggatttgggcattctaaaataaattggtagcacacactcttaaaaatggtcaaagattctccgagaaagagttacctttatttctagcatcagcagtagaatttaccagggcagttcattttctagcacaaacatgtgaatatattcttcttatctactacaacaactcaaatccaacaccagtaagaatatcttgaatttgagcactcaaaacatcaggggtattaggggttgacatcgtgtggtccactattttttttcttttttctttttttgctttttttttgagttaattgtgctaccatattatgctttttttcaatggcaaaataaactcattgttaatgatactaggcaatataaactcattataagctttttaggcaaattaaactcaatttacttgtataaatgagcatgtaaccccactctttttgtaagaatgcaaacttgtaaactttcttttacaacaaacaaactaaaataactaaaataactagaaatgtcttgtgcttgctctacaccaaaaactcaaactactaacccatgtttatgtgatgatagtaaatctaaaactcaacaagaattaccatcatgtgcatgtccaaagaaatgtcaatgtggtgataaatgtcaatgtgattcatgttcagaaaatgaaaataattgtatttgtcaatcaactaaatgtgtttgccaaggaacttgtaattgcaaccactgtgaaacaataaaatgtgcttgtcctgaaaatgacaattctaaaggatgtgcttgttaattgaagtgtttaattttataaataatatatatatatagtatatgtatatcaatttataataatgttaaattctttaaattcaattgtagatctgtaagtaatgaagttttcaaaaaatgatcaattcttaacttgaaaaggttcatactcagtttgatctttctccttcatgccaatagtgtataaatttgcaattctcctttatttgtgaaattatcattttattattcaatttagttaattttgttaactctgcatcatttttctaatttccaattaaattgtaaatattaccattatttgtacgtacatagtttatacctgttaccttcaaatttagtatttttttacaacgaaatagttgtttttgaatcattacagaaattaaacatgctatgaatttctaaaattagtatattttcaccataattaaaattgatggtaactaaattatcaaaataatcaccaaaaattataaaatcttcagaatatacataaatagcagatattaattcccatataaataaaagtttaagtttgattaatttatttgatgagttaattctagttaaataaatacctgcaaatggatcaattaatatgtttaattttttctttatttttaagttattgttctatgattttcaacttgtgtgactttattagagaaagtaattataaatttaaaatctaatttattttcaacatcatttttaaaaacttccaaagctaagttaaatggtttctttataatcttcatataataacgagatcagttttcaatttccttgtaacggatatattgataagtaaatttaaatatttttacaaatttaaacttatttttttattatgtgttatatttgttatttatggttttttcagagcattttattaactaatgtcaaacttgatattcttctttatacctgtgtaccctcataatgtccaaaaacatcgtttttgcggttaaattgcggctgggagattaaaaatcgaaacacagagagtaaatcaaaattattgttacagttgatggggctatggctcaatggtagagctttcgactccaaatcgaaaggttgcaggttcgattcctgttggcctcaatcagttaatttttttagtttttctctatattaaacatttgtctccaaaatacatcctctttttctactaaattgatattaatctctaaccatttatttttctaaaagtaagcttaaacacatatctataaaattttcccgctgttttcagtaaactatctaatttaatttaataatacattatttttttgattttttcttacttttcttaactcttgaaggtggtgcagcatgtccacttgattcaacatgttgaaatagtttatttctactagtaaactcttcgttacatacagaacataattctttaattgtacttgatttttgcgtattagatttgatatttgtctttattttagatttctttgatttatttggctttttagatgtcccccaatcatcatcactctcagaatctaaactggcaccatttagtaatttagataattcatcaagtttttcatcagttttatttttctttgatggttcggtagatttgttaggttttatatcgtcttcatagatatcatcatctatgttatcatcaatttcatcatttatactatcaacagtttcttctttaatatcatcatcaataacttcatctttcacatcggctggtatttcatcattaaaatcaatattatcttctttctctttcatcaattgttcttgcattaattgctctgcaaacattgcttctaattgttcatttgtaagatcatccaaatcaccaaatgattctaacgcatcttcaaattcatcatctaaatcatctaaatcatccccatcatctattgtctcctttatataattatcattatcaattccaagttcaataccttctttcctcatttcccattgtaattgttttaataatttcaaatgtttctttgatctttcatgatcttcaaattgtttctcacttttaaatactttatcacaaataacacattcaaataaatcatcattaatgtccaattcattatcagattcttcaccattaatcctttgttcctctttatataacttatctaattgttcctcaatttctgccaaatcatctggatcaacagtttgccaatcttgttcctcaaataattgtctctgtctttgtctctcttctttctcaatttgtgcctgtcgtttcatttcctctctttgttgattaagtttattcttttcataagcttttcttgcctttgaatcaattctactatcaatttttttaataaaattaataaattttctaactgtttcattgaaaagtttctttgattgatctcttaattttttattctccttttccattattcttctagttcttctatcaggtgccattgaatatctatattcatcacaccaagtaaaagttttaacagattggaaatttgaccaaactttataaaacattctagttgattcaaaatttgattttgaattaccaattcttgggaataataattcttttggatcacaaacagttgcgaatggtgtatcatctttaaaattattaaaacctggtaatttttgttgtttaccagatgtgacttcctcagatgcaattctatctaataatacactaacaatactataaaatccattaattgaatcatcaaatttttgataaaggttaacatttaaatatttttcaatatcatcaacttgaatacctgaataataagtttcaaaattttcatcatcaaaattatcattatttgaattactgttttgatcaccatcttctcttaatatttgaaacttatgagaatcataccatgatctctcctgtggatcacttaatgtttcatatgcaactctaacttcattgaaaagtcttgttgtattttctatatcatcaggatttttatcaggatgtaaaattaatgctttctttctgtaagctttcttaatttccaaagatgtagcagtttcctcaattcctaacaatatatagtaatctgtcttcatccttggtctgatctgctttttgaactaactggaagatctatttcaaggtcaaattatcatggaaattgtgaaaattattgatgttccaaaaggaataatgaaaaatctctaatattcgacgcgacaggccccttttccctcacttgaaatttctcatgtggacaactcatttaattgttttggatccaattgtatatatacgatcagcaactgcttttgatttaggacttttactgggaactactgcaattaatacttaacaatggcagtattggcagcatctatctgtacacatggtggtaaaccaattatttcaagacaatttaaggaattgactaaggaaagggttacttcattattattaaattttccttcattacttgcagagagtaatcaatcacaacatacttcagttgaagatgaatttgttagatatatgtttcaaccattagaagaattttatgttgttttaattactaataaacatagtaatattttacaagatattgatacattacatttatttactcaatcaattacatcaattttaagacatgttgatgaaaaggaaatttttgaaaattgttttgatctattaagtgcatttgatgaaattatttgtttaggttataaagaaaatttaacttcaagtcaaattattaatttcttagaaatggattctcatgaggaaagaattcaagaaattattgaaagaaataaagaattagaggctgcagaggcaagtaaaaagaaagcagttgaattacaatttaaagaaatgatgaagaaaaatcaaatgtctaataacaatggtcaatatgctcaatctatatttaatacaccaattgaagaatttcaaccatcatcatctattcaacaacaacaacaagaacaatattatcaacaaaatgaatatcaaccaaagcaatcacttttatcacaatctaagagaggtggtatgcaattaggtaaaaagcaacaatctgcatttggtgatagtcaaccattattaattaatccaacaaattctcaaagacaacgaaatgttgaattagattcatcaaatagtcatatacaacaacaacaacaaagtcaaaataatcaacatatacctaaatcttctaataaaccacaaattgaaaataatggtattttacttacattaaatgagaaatattcagcacaaattacaagggaaggtacaataacatcagctgaagtgaagggagatttacaaattagaattaatgattcaaatttatcatttgctaaagttaaattattattaaattctaataatgatatttcaactcaatataaaactcatccaaatgttgataaacaattatttaattctcaatcaattattggattaaaggatccaagtaaaccatttccaagtaatgatcaaaatttaggtgttttaagatggaagagtaatttgaaaaattttgataatggattaaaattattaccaattattttaacaacatgggttaataatgataataatggtagaatttctttaacatttgaatatgaatgtaataatgataaaaatgttgatgaaattaatttaattataccaattattaatgcaagtattgaaaatagtgaaaatgataatgttaatttacaatttactgatgatggtattaatattaaattaactaatttattagaaaattcaacgggttcatttgaaattttatgtaaagatgttgatgatgaggaagcattattcccaatggaaatttcatttaatgaaagtaaaaaaattgaagattcaagtgcaaatgataatattcaagtatttattgaagatgttattagtactgaaactgatgattcattaccatatgatatttacaacaatgcatcaagtgaaagttactacgttgtttaagtactttatatattgtaagtagattatatatattataacagttaatcaaaattaaattattaaagtaaagtaaagagtaaagtaccttaaggatagaaaaatttcaacactgagaaaggatccaatctataaacactttcttctatatgacaatgaacaatctagggatagctaataaggtgagattacaccttatatattccaatcaatggaagaatataactacaattgaactacagaattcaaataataccataacgtatatacttcatggtgaaaatccaaataatgtaaagcaatacgtactagctataaataaaacacacaaagttacagttgaagatatggataaattgtttaacaaaattgaaagtaatcaaggtatagaattagagaagatattaatggggataattgatactgatggtagtattttgttttattatgtacataaaggtgttaaaaattttagtgattaataagcgtaatagctatactatataaaggatgagatgaatgatttaaaagcattggaaaatgttaaatgagatggattgtatgactttggtaatgatttagtgttgaggtattcaggataatccctttcaagggttatttttatgaaattatctgataattcatcaataatattattttgaagatatgaattgataattaatgataaaaattcactattagaagttgataatttttctttaagttgattaaaattatcaattgttgatttaagtaacttaatacaattaagattagcaataattgactttttttttattaattaattgtaaattattatcaatttgatttttctgtaaatcatttataacaggagtttcaactaaatgtttctcttcatcatctaatgttgaattcccatcattttctccatcaattatacctaaattcatacaattttcaattccattttcacgtatttgtaatggtggtaaatattgaaatggccaaggtaagtaatttttaaatgctggacgtgtaaatgattcataattagttgtattaacaaaataattgtatgtagttataatattaaagtttttaataataatatgtaataatgaatcaaataataatctttcagtggagtcattgttatcattaggtgataaataattccaaatattaattaatccagttatttgttcatcattagttattaaacatggtagtttttgtgaatttgatataaaataattagaatttggtattatttgaatatcatcaatatcattaattaattgtgatagtattatagattctatatcaaagggagatatctctttaccattaccccaagtgtaaatattcatcatcttgcttaaagaaaaagaaatcggtgttgaaattacatgcattatgttaatttgacatgtcgagaaattatcttaggttcttttcttgtgattctttttctttttggtaaagaaaatgtcagttgataaacgagaagcagaggatggtgttgagagggaagatattaagagagtgaagagtgaagaagttgaagaagttaaggaagagatcaaagagaaggaggaagagattaagacaaattacacatatggagaatggaatagtgtattaacaactgcagttattgaaggtaatgaaaataaaataactaaattatttgatacttatttatcacaatatgttaatgatggagataaatggacaatgtatatcgaatggatgatgaataaggaagaagatggggataaattagataagaaacgtattgagagttcattttttaaaatattaacaaaaatttataatgttgaattatggagattatatttaaaatatgttgaaaaagttaatccaattacagctggtaatgcagaaaatgcaagaaatattgttttaaaggcatatcaattttctattgaaattgttggacaagatttttttgaaagttataatatttggtcagattatttaagatatttatatatttggcaacctgttacacctaatgaagagaaaactaaaatggaattaattagatcatcattaaagaggatgattagttatccaagtattaaattagaggataattggaaaatatttgttaaatttgaggaagatttagatttaaatcaatcaaggaaaataattaatgaaaatattaaagaatatttaaaattaaaggaaattaatgatgaattgatggaaattactaaaagtataagtaaattaaaagataggaaatatagtattagacaaattcgtagatggaataaatggattgaatgggagaaaaaaaatttaatgaaaaaaaatgaagttgaattaaagaagagaattaattatgtttataatttaagtattcaatattgtaatataatacctgaaatttggtataattattatgaatatttgaaaaatgaggaagatattgataaaagtaatgaaattttaaatgatggattaaaagttaatccaattagtttaatcttaacaaatgaagttagtaatgaatatgagataaagggtgatattgagaaaattaaagaaatttggattaaattgattaagaatattgaagaggatgaagatagtttccaaaataagaatgagataataacatattgttattgtagattaatgaaaattattaatagaataggtgatattaaagaagttagaataatttttaaaatgagtagaaattttaaaggaattgaatggaatatatttaaagaatattcaatgattgaatattataagaatgaattaggtattagtaaaagggcatattcaattggtatgcaatattttaataataatattagatttatttgttcatatttagattttttagtattaattaaagatatgactaattttaagaaaattatggaaatgagtttagaaaaatttgaagattcaaatgataggaaaaaattatttaaaaaatattttaaagttgaggatagatttggagatattggatcaattaagatattaattaagagaagtggtagaggtatttatttattagaagagggattaagagatgaagaagatgattataatgaaatgaaatcaccagttgcagtattagatcaatatcgtaaaggaggatataatgttgaattagaggaagtatttgaagatgttaaagaggtagtaaatgatgtagatgaaggtaatgatggtatagtggtagcaaatgatgatgagtatgttatatagggtagaatagatagatcttatgtaaatgattacataagcgaaagcatatcacgtgactataaacacagacgcgactatattacgtaatgcatatagaaaaataaattattattggataatccgacacgggaaattgaaatcattcactcggattgaaggcttgtcaaaaataaagtcattattatataccttataacttaatattgagcttgttaggttcatgtaccttatctttattttatcttttatattgctttattctttctgtaacaagttatattagtatatcgtatgtattaacattattacaatttgcagttaactgattgtccatggatcatatagtatagtaataattaacattatgttgtcaattgattttaaacacagcattcacaccccccccaattgtcaacttgttaattgtaaatcttgaaatatgagaatatgaaaattactaaaaatcactaaaattgcgagtgaaatgaaaatgaaaatgaaaattccgagacctgtacaccacataagaaagatcccggagattttatttttttaaagaatccccgacattcccgacattcccgacattctacgataaattaggatattagcgcattacataatcccactaattactgtgccatttatccatttcacttcgttgattgttttttctccgttatttaacaagttatttttcaattattcgaaaattaattaaattaatctccgctaaattactatactcatattatgactccatcttaatatcatcttcccgctattatgaattttaaatactaacatttatttattatatttactatttccttataattcagtttttccttttaaatatatattattcccccttttatttgttcttttcaaatgttatcaagatcagctaaatctgctttaaacgcaaaatcaattttatcaaaaatgtcattctcaacaacttcaattgcaatgagaactgaaaaagatgcctttggtgatattcaagtccctgatgaaaaatattggggtgctcaaactcaaagatctttacaaaattttaaaattggtggtaaaagagaagttatgcctgaacctgttattaaatcttttggtattttaaagaaagcagctgcaaaagttaatactgaattaggtgctttagatccaaaactttcagatgcaattcaacaagctgcaactgaagtttatgaaggtaaattaatggatcatttcccattagttgttttccaaactggttctggtactcaatcaaatatgaatgcaaatgaagttatctcaaatagagcaattgaaattttaggtggtgaattaggttctaaaactcctgttcatccaaatgatcatgttaatatgtcacaatcttcaaatgatactttcccaactgttatgcatattgctgcagttactgaaatttcaactcatttattacctgaattatctgctttaagagattctttacaaaataaagcagatgaatttaaagatataattaaaattggtagaactcatttacaagatgcaactcctttaactttaggtcaagaattttctggttatgttcaacaatgtactaatggtattaaaagaattgaaattgctttagaacatttaagattcttagctcaaggtggtactgcagttggtactggtcttaacactaaagttggattcccagaaaaaattgctgaagaagttactaatttaactggtttacaattttttactgcaccaaataaatttgaagctttagcagctcatgatgcaattgttgaaatgtcaggtgctcttaataccgttgctgcttcattatttaaaattggtcaagatattagatacttaggttcaggtccaagatgtggttatggtgaattagcattaccagaaaatgaaccaggttcctcaattatgccaggtaaagttaatccaactcaaaatgaagctttaactatggtttgtactcaagttttcggtaatcattcatgtattacatttgcaggtgcatcaggtcaatttgaattaaatgttttcaaaccagttttaatttctaacttattatcatctgttagattattagcagatgcttcaaactcatttagaattcattgtgttgatggtattatcgcaaatactgataaaattgataaattattacatgaatcacttatgttagttactgctcttaatccacatattggttatgataaggcatcaaagattgcaaagaatgctcataagaaaggtttaactttaaagaaatcagcattagaattaggttatttaactgaagaacaattcaatgaatgggttagaccagaaaatatgattggtccaaaggcttaaattatatagttttaatgaaattatagttactaagttatagttactttaccttatttatttatattaacgacaacataaagataaaaaaaatatattacgtaatactcgtcgatgggacgatgtttttttgccttccttcaagtaacatctggctcatcatgaatttgaagtgaagtacacaattttgccactgaatctagtggattttctaaatgaattatcacttttgactcatttttctactgaatttaatcaaataatgtttggacacgccaaggctgtttctaaacgtacagctacacgtacaattttacgttccaaaaggattaataaaagtataaatttaaatattaatgttattaataatataaattgtaaaagatttgcttcaaatgttagtgattttgaaaatattcaaattaataaacataattataatcatttaaatcatttaaagacaacagatttatggaattttaataatcaagaattacaatttttaaagaaagattcacctaagtctaataatgcagaaaaatctgataaatccgataaatcaaatgataaatcaaaaccaaaatctgataaaggtaaggataaaaaggataaagatattgaaaaatcagataaatcagattctaaaatatcaacatcatctacatctactggttcctcaactgccgcttcaggagctgcaggatcaaattctggttcaaaaccaccatctgatgatggtaaagatgatgattctaaaagttttaaaaattcaacagctattgaattacctgaagtttacccacaaatagttgcattaccgatttctagacgtccattattcccaggtttttataaagcagttataatttcagatgttaatgttataaaagctattaaagaatcattagataggaaatatccatttattggttgtttccttttcaaagatgaaaatatggaaagtgatataattgaatcaaaagatcaagttttcgaaactggtgttttagctcaaattacttcaaatgtttatacaaaggataaagatacaggtgttgaaactttaacaaccgttttatatcctcataaaagaattagaattgatgaaattttcccaccttctaaagaagcagttaatgatgttgaaattaatgcacattccgaaattgaaccttctgtttctgataaagaaattattgaaggtattacaggtgaaaaagaaggtgatgaaccaattagaaccactccatatgtagaagaaattataattgaaaataaaattgctgataaagttgatgcagatgaaattattgaagaagaaattgaagaagaacaagttaatccaactgaatttttgaaaaaatatcaaattactttagctaatgtttcaaatgttgaagatgaagcttttgttaaaaatgatccagttatttcttcattaacttcctcaattttagatgttttaaaagaaatgtcactagttaataaatctttcagtgatcaattagcaactttcagtgcttcattacatagtgatatctttaattgtcctgaaaaattagccgattttgccgctgctgtaactgctggtaatcaagaagatttacaaaaaattcttgaatgtactaatattgctgaaaggttagaaatggcattaactgttcttaagaaagaattaatgaataaggaaatgcaaaagaaaattgaaaaagatattgaagaaagaatggctaaaagacatagagaatatcatttaaatgaacaattaaaatggattaaaaaggaattaggtattgatgatggtagagataaattaattgcaaaatataatgaaagagttaaaaatttgaacatgcctgaagaagtaaagaaaatttatgatgaagaaattaataaattacaaactttagaaactgttatgtctgaatttactgttactagaaattatttagattggttaacacaaattccatggggtaaacaatctgttgataattataacattaaaagagctaaaaaagttttagatgaagaccattatggtttaaaagatgttaaagatagaattgttgaatttattgcagttggtaaattattaaataaaattaacggtaaaattatttgttttgttggtccacccggtgttggtaagacttcaattggtaaatcaattgcaaattcattaaatagagaattttatagattttcagttggtggtttaagtgatgttgcagaaattaaaggtcatagaagaacttatgttggtgcaattccaggtagagttgttcaagcattaaagaaaactcaaacagaaaatccattaattttaattgatgaaattgataaaatctctcattctcatagtgttaatggaggtgatccatcagctgcattattagaattattagatcctgaacaaaatggtacatttttagataattatatggatataccaattgatttatcaaaagttttatttgtttgtaccgcaaatacattaagtacaattcctggtccattattagatcgtatggaagttattgaaatttctggttatattgaagatgaaaaaattaaaattgcagaaaaatatttagcacctgaagcaaagaagaatgcaggtttagaaaatgttaatgttgaattaactgaagaagcaatcaaggcattaattaagaattattgtagagagagtggtgttagaaatttaaagaaaaaaattgataaaatttatagaaaggcagcattaaatgcagttgaaagtattggtgaagaagaaattgatgaaattattcaagaagagaaggaatcaattttacctgatggtgcagcagttgatgtatcaactgaaaataaattgaaggaaaataaagttgaagaaggttcagttttagataaattaaatgaaaaaccatcagaaacaacaaaaagtgaagaaactaaaactgaaggtgaagaatctgttgttgaaactaaacctgaagaaaaaattaccacaaattgttatacctgatgattataaagcagttatatcatcagataacttaaaagattttgttggtgtccagtttacacagctgatagattatatgaaaccacagtacctggtgttgttatgggtcttgcatggacatcaatgggaggttcagcattatatattgaatctattttagagcatgcaattacaaaggattctcatgcaaaattagagagaactgggcaattaggtgatgttatgaaagaatctgtaagaattgcatattcattctctaagatgttccttgccaaacattatccagataataaatttttcgataaggcgcaaattcatcttcattgtcctgaaggagcaacaccaaaggatggaccatcagcaggtattacaattacatcatcattcctttcattagcattaaataaatctttaagacctgatgttgcaatgacaggtgaaattacacttacaggtaaagtattaagaattggaggattaaaggagaagacaattgcagcaaagagagcaggtgttaaaacaataattttccctaagggtaatgaatctgattggaaagaattaccagataatattaaagaaggtatgataccagttccagctgattggtatcaagatgttttcgatgttttattccaagatgttactaaagaagagggtaatactatttggaaggcagaatttgataagattaaggaagaagagaagaaggataaaggacaataaatgattgagtggaatgtatcttgtacgtgtatatagtatatagaatatatggtgaatgaacactgctttttataatgtaatgaaacaataaaatatggtaaaaatagtaatataacatgtagtaaaatagacaacatgaatctcgagaaaatatatcgtattttcaattatttattgtgggcatgtatgtttcttctttttaacttgtgatataaaacacagacaatgactgatgtatatgaaaacagtatagacactgagataaccaacagtgaagcatccagtgcaggttctaataatgcaacatcacaacaaactattgaaatttataaacaagcattaacatttaatgttattgctaaatatgatacagcaattacacaattattacatatttcatcatattgtgtgatatatcaatatgatgaagaatcagaagattgggttaaaagttcatatatgggaccaattacaatttattcacgtcgaagttattgggataaatttgatattaatgcagatattaaggaaactgaaaaaattaatgttaataaaataattaatagtaaaaatggtgaatattataaatttggattaatggtgttgaatcgtagtcaacctgaaaattttagtttaggacttttaggtgataaatatttaaataatgatgaaataatcaatgaacgtaatttactcattgaaaaaagtgatgaattgattataattagagattttgaaggtaatgcatttggattttggatatttgatgaaaaggatagagattatttatatcaacttttaatgtattgtattgataaacttgaataagttttatataaagtttataaagtaagtattactatgcagttggatttttctttttatttggagcacgttttttcttaacaacaggttctgtcggttcaggtactggtaatccaccatttgatgcagctgcagctgcagcagcagcttgagctgcaagttgtttctttgtaggttttcttggtttctttggtttttcaacttttttcttaccagttgtagttgctttacccttacctttggcacctttacctttagcatttttaccatttgtattaccgttttcatcattattaaatccattaccattaggagtgttagtattattggtattgttattattaattgtaccagtattaatattattattaccattattcataaaattattaccagtattattcatattactattattcatagtaccattattattaatattcattttattttgaattgatccaaaagatttattactaaatccattcattaatgaactaaaacttgaataaccaccattttgtttattttgtgaacttgataaatttcatcttattaataaattattattctaatttcatctttatttaataaattattatttcttaaattttcaataaatcttaatctttcaaatcttggtaattcaacaatttgtttattagaatctaaattactatgaggtaatgattgtgacattcataagcattaatttttcatattttgaatttgattgtaaattatcaatatgtaatggtttataattcatattttcataattaatggatttttttcttattagttaatttaacagatttattgaatgttgctaatataccactactattgtttttctttttattaaatgtatcattaaaatctattaattctctcatatctgtacgatgtaaatgaatcatttcatcattttcttcatcatatttaggtttaatcatttctaattctggccataatgatttatcctttaaataaggatttgaaattggttgtaaattaatacttctatttgaagcagttaaaatttcactttcataagttaaaacaaatgaatctccaaacatttgagtatctgttgtaacacagaaatcttcatataatgcagattgtgttaatcttaaaatagttctatattctttatattttttggttgtgggttcagttgattgtccaggtatagtagttttagcattttcactaacatccttatttgggttttccaaattagtattagtagggttggttttgtcattggtatctttatcattaatatctttactgttattgttattattatttaataatttatttgaacttctatgatcaaaaacacgtaatattatattaccatcatatagaggtatattaccatcattaataatttctattaaagcatcaggaattttctttttagcaacatatttaaggaaatcttttatagcaggatctgttttcggtattaaattatcactatgaccaaatctataatgatcattatgaatatggaaatccattgaaggtttacaattttcaaattttttcaataattcatcatcagattcataaaatctttgagttttagcctttttccttaaatattgtaatttttaataaatgtttttgttgaattgataatttttcatattgttcatttgttaaaccaaataatttttgttgttgttgttgttgttgcttttgtaataataattttttttgttcttgttgttttaattgttgaatttggaaatcatttaattgtgttgatgataatgaaggtttatttacgttaacaggaggatttataggtgcattaacaggtatattaacagggggattgacaggtgcattaataggagcattaataggagcattaataggtgcattaacaggtagcattaacaggtatattaacaggtaaatttacaggtatatttgataaatttggtgtattatttgaagtattaatttgagaatttattgaataattaatattattattattattaattggaatatttttagataaattaactgaattttctaatgatgaattaactagaatatttgaataattttgatgatttagatggagaatttaaattttgattataattatgtgatagtggtgatgatatatttattggtaaattattattaattgacatatttaaagatgcagatgatgaattatttgatggtagtgatttacctgggattgatttacctggtaatgattttccagccagtgatttaccaggaagagatttgcctggtagagatttaccagccagtgatttacctggtagagactttccaggtagagactttccaggcagagatttcccagctatttgaggattaattcttctattattaatatgttgattatttatcatgttattattgtaattcatgttattactattgttactattattattagatatattatcacgtacttgattttgatgttgttgttgaattgctctttgttgtaattgattttgtctaacaacttgagcttgtctaatcatttgttgatgcctttgtaaaatttgaacatcagaacgagttaattcaccactacgtaataattgttgaaatctttgttgttttgttataccaggacctggttgaatttttcttaataaagattgaacataagcagggttccaacctgaagaatctaaattatttgaagatgatggagtaataggtgaattaatcattgatggattattattaatagtattaattggcatgttcatattattcatattattattgttcatattgatattcatacccatattattattgatattattattgatattattattattcatattattcatattgatattattattcatattcatacccatactattattattaatattaatttgattattattattactattattataagaaagtatatcagattgatctgagatatcacgagggatattatagccagtattagagttcattggataggtcaataatacttatccagtataatattctgatacattcagtataatattctgatacattcagtataatattctgataataaaacattcatgttcaccaaatgatacaaaaaaatatcctcgcaaaattaaatagagtattttttttaaaattccgagagagagaaaaaggggaccttttgaatatttttcaacacttttcatttctttcattccttttattacttgtttcttttaaacaactctgatatattgttatattgggataaagcttatatctccattctatttgctttcttatacttaattatataccattcaatatagtatattatagtatattatagtatagtatcttttttctaaactttctaaattttctaaattttcaaattttatattctgattttgccatcggaattatacacattttcaattcaattcaatttaattcaatttaattcatttcatttcatttacatttctttgtttccatttcagttcattaaaagttcttattatcatccccttcttagcttagcttagtttcatttacatttacatttacatttcaatatttcatttcaatatttcatttcaatacaaaatatcaattattaatcattaaatttcacttcttaaggcttattttaatttaatttaatttaattttcaatttcagttcaataattacttaactacatatcaataaacattttctcttgtacattctatttttcattataaaaggcttatacatatcataatttctgctttgctttcaataaataacataaaagttcacaaatatgtcaaattttaatcatcttttacctcaacaaattaatcattctactatgagtttaaatgatttagagaatatcaataataataataacaacaataataacaatatcaatatcaactctcatcctaacgcaaatccttttccaaattcaaatatttataataatattccaatgcaaacttcaaattctgcaagtaattttgatctttataataataataacaataataataattctcaatatagtttattaaattcaaatttaaaatctccacaatttttaaatcaattctcttcttcaactccactttcaacattaactcaaaattcaatcccaatgttaaatcaatcatctgctaataatactttattacaaaataaaaatttattaccttcatcagtttcaatgactcctcaattaagtattaattctcaaattggtttaaatgatttaaattcaccagatttaaataataataataataataatttagataacaataatacttttattaatacatcttttaatttaacatcaaatactaattcaaataataatagtacttataatttaattcctgaagtttcatcaattccttcaagaactgtttatttaggtaatataccaaatggtattacaactaatgaattattaaatcatgttagatcaggcactgttgaatcattaaaattgattccatctaaaaattgtgcatttatttcatttttagatgaaaaatctgcaactttatttcattctgatgcaattttgaaaagattaacaattaataatcatgatattaaaattggttggggtaaaccaagtcctgttcaaccagcagttttatcatgtgttcaaagatataatgcaactagaaatgtttatattggtaatttaaatgataatattaatgaagatgatttaagaaatgatttccaagaatttggtgaaattgatacaattaaaattttatatgaaaaaagaattgcatttattcattttacaagtattttatcagcaattaaatgtgttcaatcattaccattaaataataaatataaagataatagaattttttatggtaaagatagatgtgcatttataactaaaactcaacaacataatgcagcacaatatttaggattaaatccaaatgttgataattttcttaatcaagttgatagagatttaatttctaatgcattagttcaacaatcaaatgcagctgcaatgattgcaacatcaactggtggtaattcaaatttaggtaatagaacaatttatttaggtaatttacatccagattcaacaattgaagaaatttgtaatgttgttagaggtggtatattacaaaatattagattaattaatgatagacatgtttgttttataacatttattgatccaatttcagcagcacaattttatgcaatgtcatcattacatggattaattattcataataggaaaattaaagttggatggggtaaacattcaggtccattaccaaatttaattaatttagcagttggtaatggagcatcaagaaatatttatattggaggattagataaaatttctgatattaaatttaataaagataaattatatttagattttaaagaatttggagaaattgaacaaattaattttttcgaagagagacattgttgttttgttaattttacaaatatttcaaatgcaattaaagcaattgatggtattagaaataattttgattatcaaagatgtaaaattaattttggtaaggatagatgtggtaatacaccaagacaatatcaaatatctaataataataataataataataggaatccacataatgatgacttaattaatggtattgagaatatgaatcttaacaataacaataacaataataataataatcatcattatccatataataataatactagtaatgttaatgatatattcaataacggatatactacaaatactaacaaaggttcagaatatgaagatgaagatgatgaagaggaggacgatgaagacgattacattgatgaatccaaggtcaaataccaaccattgggtattatcttacaaaactcccaaaataatattatgtagtattagtattgatatttaattttatttaatttaattacgacaaacccgatattctgcccaatatcgactttccccattaggtaatatccgctctaaatgagtgaattttcagtggagtatcgggtttggcaaaaattttttcacttccaaacccgataccggttatcttatgactgataaccttgatttaatgtcgatatttcaaattggtatttaaatacaagtgatatttccatatttagatgatatttaatagaataatagatgtttatgagtaaacaaagatgaatggcatagtcaaatattatcaaaagacatcaaattttattgattcattaggtgttgaatcaaagggtattcatagatatttaccaaatgaaagatataatgaaaattcaattaaaccttacatatcaactttagggttatggatttcaggttgtggtggattaacttcaatgtcatcatattttcttggtccattaatttatcaattaggattaaaggatgcaatgctaattgggaattttggtacacttgttggttgtttagttgcagcttattgtgcaacgatgggtccaagatcaggtttaagacaaatgtgtagtgcaagatatttatttggtccttggatggttagagttgttagtttaattacaattattgggtttttaggttggagtataactaataatgttttaggtggtgaaataattaaatggttaagtaacggtaaattaaatttaagtgttggtattataattgttagtataattagtttaattgttgcacttttcggtattgaatatgttttaaaatttgaaggtattattggtgtgtttgtattaattgttgttttattgttatatattatatcaagtggtgaattcactaaatgggaaggtttacagacaactggaagtaattcattgactaaaattggtaataggatatcatttttcacattatcttattcagttgtttcaacttggggtggttgtgcatctgattattatattgtattcccagaaaatatttcacaaattaaattatttaattttacatttttaggtattctattaccaacactttttggtgcaaatgttggtattttaattggtaatgcagctgttggatttgattattggaatgaagtttatgaaaatgaatcattaggtgggttattaaatgttgttttcgataaatgggggaattttgggaaattcttattagttgtattttggttatcattaattacaaataatattattaacacatattcaagtgcattatctgttcaattacttgatgatttatgttatagatatttaagtagatggattattgttgttataattttcgttattacattggtttgttcattagttggtaagaatcattttagtgaaattttatcaaattttttaccaatgcttggatattggataagtatatattttacattattaattgaagagaatttaattttcagatcaacttcattagttagattatttaaaaaggaattatatgaagtacctgaatttgagaaaaatgacgttgatgatgaagagaatattttgccaacattaggtagcacattaacaacaaattataaagaagatgttgaaataaatgataatgaaacaagtaattcatcaatagataataataataataattcatcaataccgccattttcaacggttaattcaattccttattataattttgaagcttggaatgataaatatattttaactaatggtattgctgcaacttttgggattttgttgtggtgttgcaggtgcaattgttggtatgaatcaagtttattataaggggaccaattgctaacttagttggagatgatggtgcagatattggtatgtttttatcaattggatttacagcaatttcttatccattagcaagatattgggaacttaaaatgtttccaaaagtaggtagggtaggtattttgtattcatattatataattctttgtatttaagctagaaagaaaaagaaacattatcataagatgtaaatgcaatgcaatggaatgagagtaacggctactcatttatcaggtaagaaccatgataagatatagtatctgaagaaccatctaacagtttcccaaattgattgaatggcatgttcaggattattattaccatgggtattttgattattattattattattattattatggatattattaatgatgtcttgtacatcattatgtttattagttgtagtaagtatatctgtattaggaacgatttcttcatcaccactcgttggagctgtttcacttaattgagattcatgtggttcaaataagttttcttcttcaagtggtttatcatttacttgattatcaattggtttagtcaattgagccaccggagtgatatcattaatgtcattattatcacctttcttttcctcctcctcctcctcctcttcttcaataacataaataatattattttcattacctttatcatctaattccactgcattttcattatcacaaatccaaatattattatcaactacatatttataaataattttagtatttgtaggtgaatcagttagcatatttaaaatccaagatttatttgaatcattaaaatttaatttatctaatgttgaattccaattgttaaaattacctgcaacattaacatttgaatatgatttatttggatcatttaatctaaatttgatatatcccattgtgtattgtgtgttatttatttatttttaaaaaagatatattatatactattttcactactacaactacagtactctccaaagaatcactatactactcagcaacagtggtcaaagtcacaaacccaaaagaaacagtagaaacaaacaataataataataaagacctcaatatcaccttattgcaattggctctgaaaacgggatgagcatttcttacgtaataaagtatcttatcttatctattactctatttgcatagcagctattatattcatcttatacaggttatacatagcattatactactaattacactcaatggaatatcccatctcctctttacaatgctcatatgacttatttaaacatttattaaccatagttttcattccttgcaataagtttcataccaaaatcttttggccaatatgtttgtgcacttctatcatctgcataatttatataatcaacaattggtttacgattagaatcacccattaccttgaaaagcaaacaagttctcgttaaaataacatataaaattctattagataaattaattgcagtacatgctcttgaacctgcaccaaatgtaaaatgatatggtggtgtgttgatatgtgaatttccaataaatctatcaggtttaaattcatcaactgtttcaccaaattgttgcttatcatgatttgcagcttgtgcatttaatataactgtaataccttgtggaatagtatatccattatattggaaattccttagatgttttcctggctggaattaatggaataactgcatacattcttaataattctctaataaatgaaattgaaaattcacatttctcctctaatagaactttatcatatgcagtttcaatatcaccatattgattaattaattcattatatactctctcttgccattcatgtccttgttcactaactaattgcatgaaaattaaacttgcagttgatccaattgtttcaaatcctccactaactaatccaacacaaatacttttaatatcttctaaatttaatctactattcttaataccattactgtcaatttcagcattggcaaaatctccaacaatacttttacgttcatccttatgattaattgcttcccttgttaatttatctaaccaaatatccctagttttacctgctttaacagcttctctttttctatcattttcaggtaataatctaacaaatggtacaaaatcttgaatattattatttgttgaacgaaatgatgaaataattttaacaatatctaaaatttcttgtaataatggagttttaatatcattaaatctagttgcataacttaacattgttgtaaaattaagtgctaatctttgagtatatttataaggataaataaacttcattctgagaatctctaaataaatcttttaataatgaataaccttctaaatcaattaaattagatctctctctaattgcaggtgttgtcatatatctttgaacattaagtcttctctttttacatgtttcatcccatggtgatgtaccaatcgttaaaccttgagatgttgaaactaatttatgaaatgtataaaataatggtctatcaattaatgaactttgatttttaataaaccattccatagcggattcatatgaattaatgaaaaacaattctttgtgtacccattaaacattggaaaacaggtaaattatgttctttcgataatctctctaaattagttggatgatcatctgctaagttttccagaataccataaataatggaattacccttaatttcaggaataccttcaatctttggttgaactaggtttaataggtaaaatcatagagccaaatgataataccaataatgacaaataatgataaggttaaaccatgttttaacttttgatgttggtacaagttcaacattcaataacttttccattttgtctatactcattggatattgaagtaaggcctatacctcccatcacacaacagcagatacacttacttatgtactaccactgtcaaccactaagatacgacctatttccacttcatttccacttgcaaagtatacttactgtcgcaatacttgattcattgtcttatcagcgatgtatcatctacctctgtcgcatttaccacagtaccttctcttatcagttctactgatagttatcacccttacacaatactatatgatgatacaataagtactctcttaaatacaataaagactactaactatctccattaccttgaaactactactactctaaaaccttccaaactaccaccaaatgaaatgaaacatgctaccgttatcagtatcaagaaaccttacgtaaccttatctgagaaaacggttgatcaacaacaacatgaagaagttaaggaaggtaagacaatacggtttcataatgaccatactgatcaacacgtatcagatcctattaacaaacagaatatatgctacttacttcaaatggatgaactattttcaccagaggaaattaaaatactagaacagagtacacatcgtagatcatcaactaaatgttatagatgtaaacataaacgattaccatgtaattatcaattccccaaatgtgattcatgtttaaaggaaaatatcgaatgtaatgcttgggttagaggattaaataaaccaatacctagaagtatacctctttatttagaggataaagttgcaaatttagagattgaattagataaattgaaaaatcatcatgttattaataatgcagaagaggagagttatacaataactaaatatgtttcaacacctttattacaaagtttcattaattcagagaatgaatcaacaattcaatcattttcatttctttactttaaattcatgtaatttacctgcacctttcgataatatgattgaaggttccaagagaggtaaaatgaaacattttattgaaaatcatccacctgtcgatttattaacaattcctaaaaatgttgttaaaataatgatgtccaactatatggatttccatttacctcaatatccaattatttcaagaccaatgttaactgaaatgttagaaactgttttaaataaacctgaaattgcatcatcatttgaaaaagcagttatttcaattacaatggcaatttcagctgctttaattacaaatagaagtgaaaaacgtgcattatcatcatcaagtgctttattctctgcaactatttcaacaatttttgaaacttcttgggaaagtaaaatgcaaaaattacaattaacccttcttattgcacattattcatttgcaaatccatttgctgcagatatttggcatacattacgtgatgctttaagattatgtattgatatgggattacataaagaagttacttctgaagttattacagttttagatgttgatgatagaagaagattatttcttgtttgtagtggtatgttaagacatttatcagcagttttgagaattaaattcccaattcatcaaaatttaatatctgttgaatatccaacaattgtcggatgattcatttataactgaaaaaggtattgattattcaggtcctcaaacaaaggctgctgctttacatttttatagttttagattatgtgaaagtgaagtttgtgatgttttatggtatgataaagaaattaatgttaatataaatgattggattgattcaatggaagaaaaagttgaaaattggtttataacggcagaagaatttgctaaagttaatcaacttagatttagattaatttgtaaagcttcattacaaattagactcagaagaagaactccaagaatcccaaatccttctcatgaatctttcttaaaattaattaaagctgtcttagttcatgttgatgaatatcttaatgatgcaaaatctgctcaagtttcttatttattaatgggtgttcattatattgttgaagctgcaataaatttattagatgttttatggtttgaaattgattggatcaaagaattttattcatttgaatttttaattaagtaaattaggggaatgtattgaattattaaataaatttagtgaaagatggcctgatattaaagaatctaatataccctaattatttagaaaatttgaaaaatgatgttataaagaagaactgatggtttattaaatgatgatgaatgtaatataatttcatcaaaaattgaaaaacttatattcccaactaaaattatatcaaaagtttcatatgataagaaaaatgacattgttgataataaagttgatattaatgatgataaaaatcaaagtagtgataataatactattaataacaataatgaaagtgatatcttaaattttgataatcaaaatcaattagaggaaatggggaaatatgaacatgaatcattatctgatgcattattctctgataaatccaattggcaagatcatttcattgatgataatttttgggatctgaatgatttactaaataaaatgtgtgattatatatagaatttaatatacaatactacatagactctattagaagatcaatatatgctttaacttgtatttgcataataccaatgtgaacataatttcgaaagtatatttcgtccgataactagaatgattatctaattgttttatcagatacaattccttgataacttgaactataaagttttgaaattcaatattaaattaattaaagatattgtgatatgagataattcgatccaataaagaataacacctgaagttttcgattcgattattataatcttcaatatagtttcaatgatgaacttaatatattaataacagctgagtcataatataaattacaatcactacatttatgtgataatagaggtgatgaaagtaaccaaattttaacatttttatttgaatgatattttaatgattgaaataatgttaaaacaccacaatttgatgaatttgaatataatacattgaaaaattcagttttatcataaattatcaataattcattaaccaatacatcatcattttcaatatttaatatttgatttttttccaaatttaattgaggtggtctaccaagtaataatgataacttcactatctaaaatagctaaacattttaatatttgctttttagaaacatttctagcaactttaccactttaatgaataatagttattatttatatctttaagtttaagcttttcagcaatatcacaagcaagtgaaattgttttccaaacagttttacccatttcaggatcaagtaattgataaattgaatacaatattaaacataataattcatcaccatcttcattacttatctttgatttcattaattcattaactttttgttgtaacattaattttataattgtaaaatcagattttttcctcattaaatgtgatgcagatataagtaatattaagaatatgaataagttgtttccattcaggataatttttaaccattaaatcaaaatgaaagaaattttctgataatagggggaagctttggataaatttcagttaaataatttgaaattaatatcttagtatgttcacttgtaattaaactataatcgaattgaattttcaaatttggtaatgatctaaattccaagatattaaatcgatttaatttatttgaattaagttttatcatcattgaactcatataaaccattgaaggtattgaacatggtccaaaataatgtaattcattatctgaaccttcaagaaatgtaccatttttagtcatatcatataaatcagaagtattattagaagttgatttaactaattcttcacgattttcttcattattagtccttttattaatcttcttcttatatttatcaatttcacttcttaataagataatattatcattaagacttttaagatattctcttggaacattattacccaatccttcatcaaaatattcacattgagtacccattgatttacaatgtttacaactaggtagattaaaatcacatcttttctttcttttcttgcataatgtgcatgatggtaacattgattatttctaagatgatgagttctttgctaatagcaagaaagacgtaatacatgtacaaatatggactttatctgatgcagttagtaaatcggatatatatcagtaaatggtgtatgttctctacgcgatatttggaaatgatctgtcggatataatataataggcttactaggtcaactttttgttatagaactatgcatagttacctttattgtaccattatcagtcaagataataccaaaaaaccagcaataatcatcataatatttccatcatcggagtaatattgaaatagctctagaatagcactagtgtcaatcggcgattgaaaaatggatctaattttaaggggtagattcttggtattttaaatttgttcttttactttttgtttctatttttatcttatattatcttatcagcttactatctactttaaattataactgttagattaactggttaccaatttaaagacattcacaggtgaatataatttttcagacccacggcataacttaaatttgcgccgtatgagggatcgcttatcggataaatttaaacactaatggtaaagaataattcttgttcatccacttcaacctttctttaagacacaaaccaaacactcaattatgggtattgatggtacattattagaatacggattcaagcaacatgcttttgaatttggtaatttaaaatcagataaagttgtgattttcattggaggtcttggtgatagatttgccacagttccatatttagttccattatccaatgctcttaacaagatcggttggtcattgattcaaattgaatttacaagttcatcaattggatggggtacaggttcattagctagagaccatagtgaaatcaccaaactagtcaaatttctaaaatccgaagatggtggatcaagaaagaaagtaggtttaatgggtcattcaactggttgtcaaaacacaatgtattatctttccaaagcagagagagatgaaaattatgttgatgttgattttggtattttacaagcaagtgtatccgatagagaagctgctggtgagttaatggaaagggaaacaattgataaaggaaatgcacttgccaagaaatacatagatgaaggtaaatcagatgaattgatgccatataactatactcttaacttttttggtgctccagtcaacgcatatagatggtattctttattctccaaaagaggtgacgatgattttttttcatcagacttggaagatgatgatttcaaattaacattcggtaaggttgataaaccattattggtattatacggtggttgtgatgaatttgctccagattatgttgacaaggcattattactaagcagattcaaaagtgcaactaaacctggaatttggtctccatatagtaagataattgaaggaggtaaacataatctaggtgaaggttcaaaagaaacagcagttgatgattgtcttgttagtgtttgtaagctcctagaaaatttataaaatataaaatttcctatcatatatagcttttgtactaaattaataatatcagtataataaaagcttttaacctatgttgtcattaacattgttgagatgcatgattaacagttcctcgacgacaaataagaacgtattgcaactgtctatttatatacaacttgttttactaatcctgacagttcatcaaaaaatttatttctcaccatggtggctcagcttatattataaccaatcaaattggtttggaatagtagtatgttgatacatgttgtgtagtatagcttattatctttgtacaaatctagtctaactttacttaaagtttattcctttcagtatgaaaatataatactagtttaaatataaagaataatatataatatgaatacaaaatacctacctacttttgaaaacattttagttcccaatatcttgctaatggataagaaattgctgtaaatccaattgataaaaacataccaatatctgcaccatcatctccaactaagttagcaattggtcccttataataaacttgattcataccaacaattgcacctgcaacaccacaacaaaatccaaaagttgcagcaataccattagttaaaatatatttatcattccaagcttcaaaattataatatggtattgaattaactgttgaaaatggtggtactgatgagttatcatccattgatgaattacttgtttcattatcattaatttcaacatcttctttataatttgttgttaatgtgctacctaatgttggtaaatatattctcttcatcatcaacttcatttttcttaattcaggtacttcatataattcctttttaaataatttaactaatgaagttgatctaaaattaaattctcttcaattaataatgtaaaataaatacttatccaataatccaagcattggtaagaaatttgataaaatttcactaaaatgattcttaccaactaatgaacaaaccaatgtaataacgaaatatataacaacgataatccatctacttaaatatctataacacaaatcatcaagtaattgaacagaaaatgcacttgaatatgtaccaattatattatttgtaattaatgataaccaaaatacaactaataagaatttcccaaaattcccccatttatcgaaaacaacatttaataacccacctaatgattcattttcataaacttcattccaataatcaaatccaacagctgcattaccaattaaaataccaacatttgcaccaaaaagtgttggtaatagaatacctaaaaatgtaaaattaaataatttaatttgtgaagtattttctgggaatacaatataataatcagatgcacaaccaccccaagttgaaacaactgaataagataatgtgaaaaatgatattctattaccaattttagttaaatgaattacttccagttgtctgtaaaccttcccatttagtaaattcaccacttggtataatgtataacaacaaaacaacaattaacacaaacaaaccaataataccttcaacttttaaaacatattcaataccgaaaagtgcaacaatcaaactgattatactaacaattataataccaacacttaaatttactttaccattacttaaccattgaagtatttcaccacctaaaacattattagttatactccaacctaaaaacccaataattgtaattaaactaacaattctaaccatccaaggaccaaataagtatcttgcactacacatttgtcttaaacctgatcttggacccatcgttgcacaataagctgcaactaaacaaccaacaagtgtaccaaaattcccaattaacattgcatcctttaatcctaattgataaattaatggaccaagaaaatatgatgtcattgaagttaatccaccacaacctgaaatccataaccctaaagttgatatgtaaggtttaattgaattttcattatatctttcatttggtaaatatctatgaataccctttgattcaacacctaatgaatcaataaaatttgatgtcttttgataatatttgactatgccattcatctttgtttactcataaacatctattattctattaaatatcatctaaatatggaaatatcacttgtatttaaataccaatttgaaatatcgacattaaatcaaggttatcagtcataagataaccggtatcgggtttggaagtaaactttatttgccaaacctgatactccactaccatttactaccatttactaccataactgcagatattactcatccggaaaagtcgatatttatcagaatatcgggtttgtcttaattaaatgactattaattaagtaaaataaacaaacataacttgaatacaacatatattataaagaaaacaattacaaaaagtgaaggttcaacaattaaagaatcatgtaaataacaaatttgtaaacagtagatagtattatgtaatcatgtagatataactataaaattcgtttgttaaaaaagactcagatattcatgttacatatagcaagtatgtataatgatcaatttacaactagtttggaaccattattagcattgatgaaaaactaatacaatcattagaaagaaaaaagattaatttgatatcctttggaaacttattttctgattttaacttagttatcaaaataaaagtataatagagttttaccttcccatagaaaaattattgaaaaattgcttgaaagaacacaaagaatgatcaaggttaatcattattaataattaatgttgaaaaactcaatttcagctttttgaatatctcttttaaataaaaacctttactttattgaatgatactatttaaaagtgttgttgaatcacgaaatttgattgaatttcattaaggtgtaaacattattttcaagatttttagatgctaactacacagttgtccaaattgaacaactttcgctcaacataagtctatgtaaatgtcttacaaataaacaataataaagaatcacgttttcgatgtattataattaggaaaaaaaatactaaatagcaataaacaaaaaagattaaacaggagaaacacaagagaatgaatcagcacttgttgaactgaaaatgtatttcatatattcaacagaagcccataatcccataccagacaaagataatgaagctaaacataaaccggtatagaatatagacaacaaccaatatttagagtaaccatttttccaaaattgtaccaaggaagtatgtgaagttactggttcaaaaggtttgtaatcaacaatatcattttcattagttgcgatatataatgctgagatgtgtaaaatgaatggaataacaaaagttaatggaatcattgttaaagccgaagtaaatgaggagactgcaccaacttgtggaacacctgcaccaatgacgaaaatagcaatccaagtgatgataacaacaccaatccataatattaaacctattttagaattcaatttaattgatttattgaaaattggaatataattcttgtaaattattttacaagcaatatgtccataaaagataccttgaataaagcttgtaataaaagtcataaaacctaaacctttcaaagcattttcatcactgatcccaaaaactgcaggtacatttgagaattgtccttggtgtgcataaataaaattaccataaattaaataaatccctaagatgaaagattgagcagtacacatacttttccaaaactcccaaggtttcttcatttctgaaatgacttcaggaaaaacaattgaaccggcaaagacaaatgataaattagagactgaaacaactctattcatcaaactttgacctggtacaattgcaaaagtttcaattgcaccttgaggaacaccgagcaaactcattgcgttttcccaatttggtggatcattaccaatataacccaattgaaaaaataaattaatataattacagaatgagacaaccaaacaatatttaccaatgacacttaattttttaatacttgaaatacacatcattaagcctgcaattaatgccattaaaccaacccagcacattctatcagttctaagtataatagcacattgagcagcagctataagaattgtacctgttgataaaataacagcaattaattgtaagaaaataacaatttgcttgaactggttgaccaccaataatataagctaaatcagcaaaagttttaacaggatattcaggagaatcgaataaaaggaatacccaccagataacaccacctgagaataatgtaataaagaagaaaaccaccaataggatatttgaaggaacaaaaccaagcattgacattgaatttgggacaagataagctcccataatttctgaagtaaccaatccaacaccaaccatccaatgaccagttctcatacttcaaattattattctcccatttaggatattcaacaccattatcattcaatgaattaattttcaaagatttaaatatgaaatcattccatctttggaaatatttttcagatttgaatatcttcatattgagtttcaataaatctttgagcgtaaaacattcttgtatgaatatctggttcctgtaaataaaaatcctcatcaactttatcttttgaaaaagtgctaccaatctcgtgtgagacatatgtggtatctattttatcatttgaaatgtcaaccttttcctcagacatagtattggttactgaagtattaataaataacaatgacgtataataaatgtattataaacgggaataaccatgatatttatcctataatccgttacactggaaacactccgttattattccttatctgcaaagatcagtcactgcaattcaaggtaacatgctcatatgacatatcggatacaccaatatgatacggtaaagtacgttaaagaaccgctatcagttgttaagtacggcaatacttcgccaaatgtcgcattagatcgcatatcaatttatttcgatagccgttatcggtcaaatatcaaagtttattgatttctttttatgtctgggggtagtttgatggtatttatataagagacagagcgtgtccacatttatgacagtgttaatggttggtaactgctttttgtagtatcaagaaatatataaagatatagagaaaaatgggtattgatggtacattattagaatacggttttaaacaacacgcttttgaatttggtaatttaaaatccgataaagttgtattatttattgctggtttaggtgatagatttgcaactgttgcttatttagttccattagcaaaagctcttgagaaaatcggttggtcattaattcaaattgaattttcaagttcatcaattggatggggtaccggttcattagcaagagatcatagtgaaatcgctaaacttgttaaattccttaaatctgaggaaggtggttcaaggaaaaactattggtacaatgggtcattcaactggttgtcaaaatactatctattatttctctaaagctgaaagagatgaaaattatattgaattagatttcggtattttacaagcaggtatctcagatagagaagctgcaactttattaatgtctgaagagacaattgaagaagctaatgcaattgctaaaaaatatttagatgaaggtagaccaggtgaattaatgcctcataaatatacagttaattggtttgatactccaattaatgcttatagatggtatgcattatattctaaaaatggtgatgatgatttcttttcttcttatcttacagatgacgttcttaaggaatgttatggtaaagttgataaacctttattaactttatacagtggttcagatgaatatgttcctgaatctgttgataaggaattattaatgagtagatttaaggctgcaactaaacctgaagtttggtctccattacagtaaattaattgatggtggtttacacgctcttggtaaaggttccaaggaaactgcaatcgactgattgttgtgaaactgtttgtaagttccttcaaagtttataaaataagtatttaactcagtaaataaataaaagtctctaaatctccgtaattttttcttatcatgaaaaactgacctcactcaaatcttttatgtagggttttatgaaattatattagtatacacaaaccctttgttcattgtaaggggttaattgtcagctatgaagatatccagggcatgtctggcatgtagaagaaggaaagtgaagtgtttatatgaaaatgagggtccatgtaaatattgtatatcaattaatgaagatgatacctgtgtattatacaccacaagggaatacattaaaatgcgtaatttagaacaaagtattaatgataaaccaaatgaatttattttaaatgataaacaaattgaaaaggcagtatcaatatcattattaaatcatcctgaattattattcttaacattttctaaagatttaaattatttagttttattttcaacttatttattatcaacaccatttagtaataaatcaaataagaaaaaaaattttgaaatgttgaaaaaacttgaatcaaatgttttcaatgaattacaaagtaatataaatgatttaatttcaactttacaatatttaattataatgttattaatttattggcaagcaggtaaaacttttaaaggttatttaattggtggtatggcagagagaacttataaacttttatatagggaaaatattgaaagtttaccatttttgaaaaaagaattatttttaagaactatttggtcttatcaacttataactttatcattacgtgatgaatcttcaaatgatgttaaaaaaagattacataaatttcaattaccattttctaatggtaatgataatttaacttttatcaaggatattgatgtttcaacaactaatgattttacatcattattaatattatcatctgagacatggcttgattgtttaaattggatttcaaatggtggtaaatattattataaagaagctccatggaatacttcaagtgaatggtttcaattaaataataaaatttctgaaattcaaaataatttaccaaatgataataaatttagtttagaaaatataaatttgtcattccataataattataatagtctatattgttcatttcacttaacattactaatttctaaaatcatattacatagagaatttatacctttcattccaagtgataatacaggtgctaagggtccatttgataaattaccttggttaaataatgcacctacagagtggtggaaaaattcagcaaaagtatgtttccaatcagcttgtgatgttgcaactatcttacagagatgtagacttaatgataaaaaatatacttgtaatttattcaatggatttattggattaactagtggtacattattatcgtatattcaacatttccctcattatgttgatcatattgaagatgcaaatatatattataatgaatgtgttgaatatttgaaatattataaggaatttttgaatattggatcatattattttaaagtcttagagcaaaatgataaaatatttgatctagcagttgaaaaaggtatctcattttccattatttcaacaatggaaagaatgaaggatgatttacttgatatagctaatatttcagttcctgttaatgaagagagtaaagaaaaagttgaaagttttatacaaaatgctaaacaggaacaaatgaaaggtttccaatttagatttcaacaacaactacctgatcaattgtttcctacaaatgaaaaaatgggtaattttgcaaataattttacaaatgaaccagttaatacaatttcatcatcagagacagaatttcataaaacattcaacccagcattatcactcaatgacgatacatctatgtcagcagtggaaaagcaactactcagtgaatggtcacagttaatgaactgggatataagtactttaaagtaagtatacgattacctaagcacatttgttatcaaaattgcctaatcgggtaatccacacgataagcgacaacattaacaaaatttgcgccgctccgtttatgaatggagtttccaaatactcttatttattaatatgactgatcttctatttcctttttctaagttgtttctttacttctttctttcacttaccaatggatcaaatagttagtgattatcatacacacgttaaatctggatttacaccattaccagttgcaattgctaaatcaaagaattcaacattatgggatgttaatggtaaagaatatattgatttcttatcatttttcgcagttgctaatatgggtcatgcacatcctaaaatagttgaagcttcatgtaaggcaattcaagaatgtccattagttaatacagcattaattaatccaagttatgcagaattagcattaaaaattgaaaaaattttaagttattcaagaattgtttgtatgttatcaggtgctgatgcaactgatactgcaactaaaattgcaagaaaatgggggtatttgaaaaaaggtattaaagaagatgaagcatttgtacttacgacttctgcttgttatcatggtattacaatttcaacccattcattttcttcacagaaacataatttatttggtccttatgttccaaaagttggttcaatttccccatctggtgtatatgttgaatttggtgatattaaatcattagaagaagcattagagaaagatggtgataaaattgctgcatttatggttgaaccaattcaaggttcagcaggtattgttgatccaccaattggttatcttaataaagcttttaaattatgtaaaaaatataatgttttattcattgcagatgaggttcaaacaggtttaggtagagctggtgcacttttgaaatcatgggatgatgatgttaaaccagatttagtttgtcttggtaaaggtttaggtggtggtgttgcaccattatcggcagttattggtaatcctgaagtaatggatatacttgatctgggagatattggttcaacaatggcagcaaatcctccagctacagcggcagcatgtgcagcattagatgttttaatagatgaaagaatttgtaaacaatctattgaaaaaggtgaaattatgaaaaaattattattaaatggtaaattagatgggattaaagatgttagtggatcaggtatgttacgtgcagttgttttaaatcctgaattaattgatgataaatttaatggatcaagaattgcaaaatattgtgcattaaagggattaattgttaatagtgcagctggtggaactagaattagactttgtccaccaccaactattgatattaaagatttagagaaaggtgttaatatatttttagaatgtgttagtactgttaaagaaattgaagatccaattctataatttttgtttgtatattgattatataaaatactagataaattatacaatacatttaccatcatttttataagttttaccatctttcataacaaatgaaggatttcttaaaattgataaatcactaaaaggacttttatccaatgcaacaatatcagcagctgtaccaacatctaaccaaccaaattctctaccacatctatgtccaccacaagctaaccaaccattataagttaatgattttaaagtatcagcaattgggatacctgatttaacaaataattctgcttcacgaatattttcaccatgattaaaagtacctgtatcaccaccacaagcttgaacaacaccattttcccaagctttgaaagttttagcaaggatagtttgaaaattatcaccaaataatctttcagcaattgttaatgttggaacgagtatacaattattatcctttaaaagtttaatagtttcattatcacaccaataaccatgctccacggtggaaacaccagcaattgctgccattttaattgctctattagttgcacaatgagcggcaactggacaatcagcatttttagcttcttcaactaatacattcatttcatgttgagtatataaaacaatatcaggatttggaatttcaggtgggaattgaattgatgaaatataaggatgaggtgttaatgggggatatctcataattcttttcctataatctgcaaaaaatttaataacatcacaacccatacctaatctagttctaacagctttcctaatttcaacttcaccatcacaggcatgacttgtttcaggtatttttgtaccaccaattgaattttctgtatgtgttttaatacctgttattgaagctaaaactttagttgcaacaaataatctcggacctattgttaaacctctattaatggaatctctaatatttgcatctgcctcttgcataccttcagaacctaaatcacgatatgttgtatatccactcataagtgcaattttacaatgattaattgctctaataattctctcaacaaaactttcatctctcttttgccttgcattatctgcttcatcatatgaatgtagaaaaatatgagtatgtgcatcaacaaaacctggcatgacgaatttaccactaagatcaatatcatttgatgataaattttcaatagttgatgaaggtctttgaattttttcaattataagtccaatagctggatcaactaggaaagatatattttcttcaattcccatggttttagagttaaataaggttgttgtatgaatatagaaaggttttggagaatttttcctaatattttctaatctttcatcttcggcctttgatttagggtacaggtggaattgaacctgatgaacaaagagatgaacagcattcacaggacattgtaaggtgcttacctatatgagagtattattaaaagagacatactatagagaagaagatattataaatagaaagaagatattcagtttataaataaattatcgataagataaagaaatgaagaactttcccataatagcgacactgataaggaaaatgtcggtctttccggtaccttaatcagtcggagaaagtgtgccatgaagcaaggacgaatctcctcttgtgggcattgccaatagctgttactttggcaatttcatcttcagttagatctacaagatccaaattggcagataatcttgcagggttttgtgatcttggaataactggccaaccttgtgcaatcccccaactgagtaatatttgtgcaattgagatacctctcttttctgcaatttcctttaattctgggttagtgaaaaatgtagactcagctagatcctaatggactgtaaccgacaagtaaaattcccttactttgacaatatttgtataattcttgttgattattggaagggtgtaattcaacttcattaacttctggaataacaccagtttcattgatgatagttttctaattcttcaatactgaaaattagagacaccaatatgtttgattatttctggtttatttttttgaatttcaatcattttcttccatgtatctacataagtccaatttttttcaaaatctactgaaccatcaggtaatgttggagttttaggatcattaccatgatgattaagtggagaaggccaatgcattaaccaaagatctaaataaccacaatctaaatttttcattgtaatatctaaacattcctctgcagctgtatgccaagaatttgctaacttatcaacaatgaaaatatcttctcttttaacacctgattctttaattgccttaccaacataatcttgattaaaatatgaataagctgcatcaagcattttataaccatgttttaaagcatataaaattgcattataatccttcttcaccgttcaatgcccaagtacctaatccaattgatggaatttcagctcctgatcttaatttaaaacttttaacaaccataatgtctttgtcttgtaaatactatcccctatacttacccatcccaagaggaagaactgaaccatatttatacaacttcccaacagtggacaatgcctttccgacaacttccatggaacggtcggtgatttcctcattgggactgataagagaatttattaccattatcagtcaattgtccgaagatttgcataaatagagactaccatccccaggtagttgatgatgatgtagctataacgtataaggtaacatatagacaatgaccacgccacagtacttcccagttgatgatcctacagtgccatattggcattcagaggaggatgaattcagaaatatcagatctacaccggatttaccacaggaaactgatattctcatcattggaggtggttacgccggtgctgcaactgcctattggacagtataagcttagtgaagaagaagaaggggaaggtaaagaaggtaaaacacccccaaagatactattggttgaatcaagatatattgcatcaggtgcaacaggtagaaatggtggtcatttaaaaccggattattatagagaataccttaaatttgagaaagatttaggtatggaacaagctgcatcaattggtaattttgaatatgatcatattgctgcattgaagaaagcatttgaagatgaaaaaattgattgtgatttagtattaactagagcatgtaatgttcatttaactgaaaatgcagttaatggttgccttaaggcaatggatgcattaaagaaaaatccttattcaaaagttttaaatgatattcaagttcaaactggtaagaatgcacaaattacttcaatttgtgaaaattcttccagtttctttaactttcactgcaggtcatttatggccttataaaatggttaaaggatttttaaaatttggtattaaaagaggattaaatattcaaacttatacaactgttattgatattaagaaattggatggagataatggatttattgttaaaactaatagaggtgttattaaatgtaagaaagttgtcttagctacaaatgcttatactgcaccattagcacctgaatttgaagataaaattgtaccagttaagggtacttgttcacatattaaagttacaaataaacataaatttgcaccatatttaagtaatacatatggtatttgtcgtgatttctctaatcatgaatatttaattaatagaccagatggtggagttattgttggtggtgcaaaacctttttatcttaaggataaagatgaatggtataaaaatgcttgatgattcaaaagttttcccaaaacataatgaaattaaagatttttataaaagttttatgcaagaaaatttttatacttggaaagattatgaaactgaagttgattatttatggacaggtattttaggttattcagttgatgcattaccatggattggagaaattccaaattgtaaggaataaatatttattaggtggatttcatggtcatggtatgcctcgtattttccttagtgcaaaggcaattgcacagatgatgttaaagaatatacctgttacggagactaatataccaaaaccttttatgcttacaagtgataggttggataaggctaaaaatacaattttaagagatactggatatcttgcattaactagagaacaaaagttgtaattgtattgtagtgtgtattttgtatattctaatcatattctaatcatatcctatacaaccctacaagatatcatccatagccatgtatacccgccaagtaatcggagaagtcaccacagcgctccagcactgcaaaacatcgcaataagagacagtttcttcaccagttattctttcatttaaataccaaggttttccagtatgatctacccacttctttcaatgattccttccttatacaacacaatttacaatgcctgacgttgttttcgatattattggtacctgtattggttatgatgttatgattgatgcaataactaacagaattggtgataaattacttaaatatcaatgtaatcctgaattatttttcaatgcatggggtacagcttgtgaaagagatttttcctatttatcacaaattggacattatcaaacaacaaagaagattcttagagcaacatttttcagaacattatatcaagctggtattgaagatccaaagaatttgcaagtgaggaagatttagaatatttaagtaatgaatggttaaaattaaaatgtagacctgaattacctgaattatggtcaaaattaagagaaaatggatttacaatttggtgtttaactgatggtgatagagaaagagttaaaggttattttaaaaacttccaatttggaaatgccagaagagaatataatttcatgtgattcattaggtgttggtaaaccaacacctgaagtttacacatatatgttaagtaaattaccaaataatggtaaagatgcatggtttggagctgctcatatgtgggattgttgtgcagctaagaaagcaggctttaaaactgcttggactaatgtttatgaaaaatatccatgtgaagatattttcggtgctcctgatatcatcgcagatggattgattgatcttggcgataagataattgctgctactgtctaatctagatttgtatagaatgtataactaaataattataatagatatattaatcaaccaatcaaaatgcggctgtaccttaactgataagaaacgtatttgatagatataccctaaatagatacttattagatacttattagatacttattagatacttattagataaacactctgcgaataccttctagatactaccggaatgcttttactacatcaatataccccatctaagagataaacagtcattaactatcagtcttctatcaataccgacagatttagtgaaaaagtcggagaacgcaaatttttcactttgatttgatctattgttgcaattttcacttttatcttcatctatttctttatctaattatctaattaatgcgttatctggtatcggagagtgtagagtaaagtcgtatataaacctcttcacttcctcccatatttttaagcttcttattatcaaaaatttatcttccctctattcatcagacaatgtcgagatttcttgaaggtacagtaagtaaatcaatggtcactgaagaaattcaaacccttgatgaaagtggtagtattgatattgatcaattcccaccagttgtatcaaatgctgataaagaaaaattagttgatgcttatgttggttcagatgttggttataaaagacaaattactggtcgtcaagttttaatgattactttcggtgctggtattggtacaggattttgggttggtatgggttcagcattgaaaaatggtggtccatttggtattgtttttgcttatacaattgaagcttatattgtttatgttatgtttattcaaactggtgaaatgactgcttatcaaccaattcatggtggatttattaatcaagttttattatatcttgatgaatcttgggcttttgcaatgggtattaattttgcatttaattggatggttgttttagctgctgaattaacggcaggtattaatattattagatattgggattcaaatcatattgttcacaactgctgaagtggattgtcattttcggtgcaatttatgcatatttgtaatgtttggccagttaaagcttatggttatattgaatatgttcaatccttttattaaaattgttgcaatggcaggtgcaactttatttatgttagttgcaacttgtggtggtttaccaaagggtggttcaattggttataaatattggaaaaatcctggttgggatagaaatggtattcaaggtatttgtcttgcattagctcaagcaggattttcatttggtggtggtgaacatattgcagttgttgcaggtgaagttaaacaaccaagaaaattcattccaagatgtgttactccaattttttggagattgtgtatctttttcattggtaattcatggttaattacaatgaatgttccttatgatgatcctttattaaataatgcaagtggttcattaacttctcctttcattattacaatgattaatggtggtgttaaagttttacctgatatattgaatgcacttattttattatcagttatttcatgtggtaattcatcagtttatattggttcacgttcattagttgcattatcagatttaaatctaattcatccagtttttggtaaaaaagattcaaaaggtcgtccatggattgcaaatataattgttttcgttattggtttaggtttagcatttttaaattgttcaaatactggtgaagttgtttataattggtttaattcactttgtgcattaaatggttattttacttggttagcaatttatttttcacattttagatttagatcaggtttaaaagctcaaggtattaattttaaaaaatttaaattatatgataaattattcccttggacaacttatacttcaacatttattattttctgtttattcgtttcacaattttatattggtattttcccattaggtggtaaagatatgtcagcaagggatagagttgaaaatttctttttaacttatctttgtgttccattattccttagttgttatgcttattataaattaagacataaaacattgctaaaaaaacctgaagaaatgaatttctattatggtagaaaatgggatgaagttgaagaaaaggaagcaattgaggaagctcaagagactaagtctgctaaaactcgttttaatatatttgctgaaaagttcttagcatagatagtttatttatatcttttatcttttatatcttttatatcttttcttttatattttattcatatttttttctgaaaatcatcttttttaatttatattaaataagctattaaatacacaattaaaaacctctaacagtttttggtttataaggatgttcaagatatttgatttgttcatcagtaagtttaacatctaatgaagcaacagcttcatcaactctatcaatacttgaaagacctaaaattggacaaccacctttacttaaaacccaagcagttgcaacttgtgacattttacaatttaaatcaactgaaattttttcaactctaataataatttctttatcaaaatctgataaatctttcattatattattcattgccatatctgatttcattctctctagattcgattaacatttttcaaaggtctagctaaaatacctcttgcaattggtgaccaatgaattaagccaacacctgtttcttgacaaaatggtatcatttctctctcttcttctctataaagtagattatagaaattttgcattgaaataaatttatgataaccatttttttcagcagtaaattgtaattgagcaaattgtgttgctctcattgatgatgcaccaatatatctaacagaaccttcattaattatatcatttaaagctctcattgtttctaacattggagttgaaggatcaaatctatgaatttgtaaaacatcaatataagtacctaatctttcaattgatgcagtgaactgcatcgaaaatatgtttccttgataaaccttgactattaataaatttcatattattcaggatctttatttttaataccatcaatgacaaaacctggagtatttgaatcaacaggaaaataacattttgataaaataacgacagtatatcttggtatattaaattttttcaaaaatttaccaataattgattcacttataccatttgaatacatatcagctgtatcaaaagtacgtaaaccaacatcataacattttttcaaaattgacattatttcatcttcatcttccataacccaatcaccatattcagattttgcaccaaatgtcatacaaccgacaattaattgtgatattttcaatcctgagtctcctaaagtaacgtatttcattgtattataaaaaagtatttctataatacattatagcttctcttcgatccattccattctagatatatataaataccataaatacctgatagagaattatttaaagaaagcaaccttttgaaattcgacaatcggcgaagacgagggagaattcctgaggagggattagtggggaattccgacattttactggggttggtcgctttaacagtgatattgatatgtattgatataaccaaccaatggatagcaagggttattgagtatttaaataggaatggagggtatgctttagtagtatctggtgtggtaactcttttatgacaaggatgtcaagttttaagattggaaacttatatgaaattgcaggtagacaagcaattgtcactggtggtggatcaggtattggacaaatgatatgtaaaggatttgcagcaaatgatgttaatgttgcaattgttgatttatttcaagatagaattgatgaaactattgcgatttgtgaagaaattaagaaagagactggatcaacatgtaacattcacttcattatgttatgatattggtaatgaaaagtcaaataaggaattagttgaagtttattaatgggaattatgaaaatgttgatattttaatcaattgtgcaggtatacgaagacaaaataaggttacatttacaccaggtgaatcattagagaaattacatgaagcaactaattcaattggatggaatgattttagagatacatttgatgttaatgttttcggtatgtatttccttacagcggggttagttcaaaaattaggtgaagcagccatgaaaggtgatggtagaggtgttgttatttgcttttcatctccatgttcagttcataataatcaatttgtaccaacatatcaattaagtaaaatttcaattgatcatatggttagaattatggcagcagaatttgcagataaatatattagagttaatgcgatttcaccgggactctatgcaagtagaatgacaccaatggcaccggatgacccatcatctaatatgaaatatgttcatttagttccagctagaagagaaggttcaagtgaggaaatggcagcagctaattatattttctgtgtagtaaaggtggtgcatatgttcgatggaagaaatctacgtatggatggtggcagactgttgactttaaagggtcatatctacagtgatgaatagtaagtataaagtgtataaacttctctaatcttatctaatcttatcttatcttatctatatataactccccccactgtcaaacttcccaaagaggcaataaaaagagggcgggcattgagaaacctgatgaaaaatttatattccccttacttaaagccatgcttttggtcttttacatgatgattcatcttagtttatcgtagattatcttggattatcatacaacacacacaatatggtagtggcagatggatctttaccactgggagagttcatatactctgcaggttaaacccattttcaaaatataccttattataggggtaggattttttcttatcaaggaaaaatattactaactgtggatacttcaaggaatataagtacaattgcaataagagttttaataccatgtttaacatttcaaaaaattgtatctaatatcaataatacaatgattaaggaaattgcaacaattgttattattgcatatttcatgatgttctcacaggcattagcagttttcggggttggtgtattggttggttgtcctaaaaattggtatggtggtttaattttatgtggtttattaccaaatatttcagatttaccaattgcttatttacaaacaatggaaacttctaatattttcgaaaatgtagatttaggagtttcatttgttatgatttatatgagtttacaattattattacaatttactttcggttcttataaattaattgaatatgattttaaagtagatttgaaaatgcaattagagaaaagtatagaaaatggaaatggggatcttaataatgatatagagaataatttagaaaatcattcatcatttgatgtatcatcatcatcctcaaatacacatagagaaaagaatttaaatgatgatgataataataataacgatacaattcatcctaatatatccatatctcataataacaactccatggacttacattcaatagacttacattcaatagactcacattccatagattcctcatcaaatcatataatgcatttacctaacgtaataaatcaaacttctaatatacttaaaactctcacaaataattcaatgtcaagacaaaatagtagagtatcaatatcggtacctaataatcttacaatgaatgatcaaatgggtcaacatcctgaagatattaatgatatagttagagtttattcaaaatatgataaattaatagaggaacaagatttatcaaaattattaaaagatgatcaaattgaaaaaaacttatcacctttggctaaatttaaatatcaattaagttcaattaattggaattcagtattttgggggtttgttgatgtttggaaagattcttttaaacaacctgcttcaattgttgttgttttatcaattgcaatttcaatgattccctgggtgcaagcattatttattaattcaaatcaagttcatttatcacctgctcctgataaacaacctccattatctttcatcatggattttgcaagttatataggtgcagcacaagttccatttggtttactcctccttggtggtacaattggtagattaagaattgatagtttacctaaaaaattatggaaaattccaattgtaattacacttttgaaaatatttatattcccaataattggttgtgcacttaatgctaaaatttatagagatggattgttttatcatcaagatattctatattttgtttcaaatatagaattttgtgtttcacctgcaacttctttactatacattactgctttctatacacccaatgatggtaaaaatcatattcaaatggatttacttgctttagtttatatctttcattatatctttttagtgatatgtttaccatttactgctacttatacaatgaaagttgcattaggttattaacttgtgtttatctttgtatatttaaaaatattaagaatataatattaacattaaatcggtttgtataataatagaaatttcctatatgcgagagagatccatactaaaatactctagtaaataacacccttttctttctaaataccaaccccaaatacccagtaagaccccataatggactcacaggatgataaaacagatactccagagataagtctcttagagaagaagaaaatttcaaatttattgaataattcaataccaataatatcaaacgaaattcttgaatcaactccaataataaataaacaattcaataataataccaatccaattaaacttacaatacctaagaatccaagaaatatattcaatttaagtccaaatttaacaaaagtacagaaaaagctagaaatgacaaataatttaaatgatgaatcaattgttaaaacagcatatgatgttttcgataaaactgataattcatcatttaatagtaattattcaacattaacatcaaaatcattaataagaaatagattcaagagagaagtccatcatgatgcccaacgaatacataaacaaccaattcctacaacttttgaaaaattatacactatattttctgatccactatacgtttccaacttaactctattcttacaaattattctcaatttattaatgattttaatatttctatcattggcattatttgccttttacacaatcaagaaagatgttaataagaaaatccaattttatataaatgattcaatttacaatataaataaatgtaaaagagattatatgttaaataattgttcaccagatttaagagtacctgcattagaagagagatgtaataaatggcaaagttgtatgattcaggatccttcaaatgtcattacttcaaaggcttattttgaagttatcgcagattgtatgaatacatttttcgatacaatatcattgaaaacaatgttaggtattggttgtttattattattttccattgtgattccaaatattatgttttcaaggataagatttcgtaataataataataataatactgggaataatactgatgttacaagacaaataccacatgaattagcacaaactccattgaatcagaatgataatctacttttaactaaacctaaaactgaaacaaaacttgtaagtaatgtaagatttaacccaaatgttagttatagtttttacgaagatgaagatgttcaatcagttaaagaaaatgaaaagttcttaaaagatgatattcatgagaatactgataatattgaagataattcagttggtaatgaaagagttattttaagtgattaaaatttaatgattcagttagtaaaatattatacaatttatatacgtgttataaacatttataaagaaacacttaagcaacagttttcttacttaacaattgacttaataattcttgactgttagtctttggatcactgtgatataaacctggtggtgcagtaattggtgtaccagttgttgaattattaccactatttaaaacaccattggtcttattttgattttgttgaagtattttttgttgaataaatgcttgtaattgtgcctgtgattgtgcttgggattgtagctgtgcttgttgtccttgcggtgtacccttaattggatcaatagtttgtgatgtattcatattagattgatcagatgaaatatcgccaactgatctattagcttgtaatgcctgtaatgcttgtgcttgtaatgcttgaacttgtaatgcctgtgcttgagcttgtgcttgcttgtgcagtttgaagtgcttgaatataagctctataattataatttcttgtataaggagagaataaaattgaatcagttaattgtgaaattttatctttattagttgaattgaaaaatccaaatgatggttgactttcttcttttccttcttccttttgatcctctttctcaacatttgaaacaaatgaattaaagctatggaacattttaatatttgaagatacaattgaaaattcaggctgtttgaattttgtatcaactataaaatcaatatcaggatttgaattaagatctttcaaactatcattaattgtcttaaatgaaattgcacagccatccataacattcatatgttgatctttatccttcttctctttctttttagaaacacttggttcacattcagattgttgcttttgtaataaattatgtaattgttcttgttgatgatgttgttcattttgatctaattgatgtaataattgatcattattaatattactattacttttattttgttgtaatacatccttcaaagttgggaatgctgatgattgaatatgatcagttaatgaagaaatttcttgaggtttactctttgcccatgaaacagttggtggtaatgccggaccattattatcaaaatcatttgatgatgaaattgcattatttaatggcactgatgtagatgaatttaattgtgcaattgatgaatgaggagaattttgtggtgaatacattaaatcttcaatacttgtatgattagttgttggtcttataccattgtttgaataaccaaatgcattttcatgtaaggccttttgagccttattggccaattcatttttgaaataagagtcagcctcctcaccgggttcatgtaagaacatacaacctggatttggacatggttgacctctaagatatgatgaacaatatttagttgtaccatgagcagcttttaagactttaccatcactaattgaaccatcaactgcagctatacatttagaagcatcttcctttcttgcaaatgtaacataaactccataaccagaaggtggattacccatatgattatttatattattatttgaatttatatttgttgaatttggttgtctcttatttataaccattttagtaattttaccatattgaccaaaatatttatctgattttaataatggaattatttcatcatatgaacaaggtggatttaaaccaacaacatatacaagatttttttgtataactctcataccagctaaatggtgtctctttgcctgttcagcatcttttttctccttttcaattatttttctttctttcttcttcttctccaatttagccttatggattttccattcctcagctgtaatatttctatattcaatactttcatcatcatataatctacgacaaccaggacatctaccatttaattctggattatttctaatattattataacaaaattgacaaatttgatatccacatggacaaggtttgaaatttttatcagttatatccatttcttccacacaaagcggacaaaaatcatcttcatcatctgaaaatagagaatcacttttattatcgaaggacattattaaattatgtgtatctgtgtatattatgtgtattaattaattataacaagttaatatataaaaactataagatattatctaccggtgactacttttgcagagctgtaaacacgttacttatcgatacaccagataaaccatccaaaagaagatgtatttcattacaaataaacttaaaactgagccaggtaagcaaagtcaaaatttccattctctcgccctctcagaaagttaatttttaactggtgcactggataatattcattttttgtgacacgtcttttgttgtgtttcactacatgaaagtttttcagtatttaccgtcaatacgggtttttttggttattataatactttttttgtagtagaatacccccattggcacactatggagacttcacttggcatcaatgacatgcagctcttgctgcataaccttatgagtgcagataacaccgtcagaatccaatctgaactcaattttaaacatttcatggaattcgatccaaattcattctcatctctgctcattcaaatagccttaaataactctaataaacttaatattagacaatcatctcttctacatttgaaaagaattgtcccattttattggtcaccggcttttgataaatttattggtcctaatactattaatcaagatgttaaaagtttattaagggattctttattaacattagttgcagattctgattcaaagattagatcaagtgcagcttatgcaattgttcaaattgcagcagtcgattatccagatgaatggccttccttattgaatcatctctataacacagccatcgatattaattcatcaatgtttgctgtcgttggttcattattagttttacaagaaatttttgatgatgttgttactgatgaacaattatttgaaggtggtattgctattcaagtattaaatacctgtgaaactttattggttaatgataattatacaattgatgtgaaagttgaaactttaagattattgaaaatactatgtcaatccttcgataatgttgattttgaaattgctaatagaggtgccttctgtgatacagttattcctcaagtttatgaacttttactcaaaaattgcaccttattatcacaacaaaattccatcaacaatcaattagttgtttgggatttcaagcatgagatttattctattttaaatactttgataaactcatttgccaatattttagaaaattatatccaggattcattcaatgtagtattacaagatatcaaaaatcaagaatcaattgttgttgcagtaaagtctaaagattacaatgatatcaactttttgaaatccatatttatagatgttgatcattttctttcaacacagagggaaggtagagatctatcacagttcttatcatttacaatattaaaagaatttagtttcttacaaacattaatcgaattggaaaatgtcaatgatgtaaacaaaatatcgcaaatacttgatccaatattaaatatatcaactttatcaatgaacaaagttgaagcctataatgatgattttaatgaatttgtcactgatgaatcaggtttaaatgttgaaataatgtttagagatggtccaagagatttattaagtgaaatgaatgcaaaggataacttgattttcataaatttactcattgaaaaattctataattgtaaagactcaagtaacggaacttatttacaattagaggcaattacattcctattaggatgttgttttgataatgatgatagtatagttggtgaaccaacttttgaccttgaaaaattcttaaaaagttcatttatgataatacaagatgttttaagagatgataatgttttctatttactagtttccagattgattcttatggttccaaaattcttattcaaatattcttcagcttatgataataattttagtgttgaatgctttaatcaaatttgctcatcaatacaaaaattaggtgatcatgaaagtttacaatatgttaaagcatcagttttaatgtcattacaatattttaactattttattagagctaaggaatttaataaagatattcaaattcaattaattgaaattgtttataaattatctgaaaactcggatgctgatacaaatttaatgctcttagaagtattgactatagtcatttcaatggataatcaaaaccttgttaatgattcaaatactttgaaattaatcttaaccattggatttaatggtgaatctaactttgcattaaacaactcaatgtttgaatgtattgatgatctcctcaaaaatatagaacaatcaaaatataataaattaatgcattttgttttaccatatttattagaaaaagtttccaatcacagtgaaacttatagctcaagtacagatctaagtttacaagtattagcaacatttttgaaaaataaaggtgaagacttatcattatctaaagaattatttgattcatcattttcaataatttcaaattttataaacacaaccattgatgatgaattaattcaatcaagttctgaaactttagttgaactcattaaaacatcaactgatttatgtggacagtatattgatactaaatctggtgaaaatggtattcaaatattattgaaaaccgtctctaatttattgtccccaaatatgtcagacagagctattgttaaattaggtgatttaatttcattattattaaataattttcatcaacatatcgatcagtatttgaatgatattttgaaaagtttaacaataagattagttcatgcaaaggaagttccaacaattgaaaatatggttttaattttcaataatttagcaatttctcaaccacaggcaacactttcatttttgaaaagttttcaaattgatgaacaacctgcaattgttaaaatcttaccaatttggttccaagcttatgaagttatgcgtggttataattcaattttttcaaatgtacgtgcatttattgaaattttcagtacaaatgatgaatttttaagtcaattaatggttgatggtaatccattgcctcatcaggttgcagaaggtgtaattataactagatcgatggctaaaaaaatgccaatacaatttgaaaaaatacctgcaaatgctaaaattattagattacttttagatgaattgaaaaatgaaatgacttcaagtgaacaaattccaggattacaaaatcatagtgatcaacatcatgagaatcatgatcataatcatcacaatgaagaagaagatgatgatggtgaaggttgggaagatttagatgatatagatgaaggtaattttgaacaattaaaaagctatgttgatgaaggtggtgaagaaaaacgtggtagtgatagatccacagatgatatgaaaacattattaattgaatttttcaaacaatgtacaacaaaaaatatatccaatttccaagaaatctatcaactttatttgagtgatgttcaaaaacgtctcttatctgaatatttagttttcactaactaactttaatcatttttaaattagacttgctcttttcgtgtttttatagataatttacataatgaatataaaagaattttttttacaatacttctttattatacttccaaatcaatatccaaatcaatttcgatatccttgattaaagcatcaataccttgtcttctgaaaatactgtttttaacattattcttttcttcctgtacatcaactttcttttcctcttctttaacattattttcatttttatcattagaacgatagaaaactcttaaattagttctcaatctactgaaaggatcactaaaatcgttattttgtaattgtttacgtcttgattcaaccaatttcttttctgcctttctaatgaattcttgattagatttttgatttctgatattaatttgttctaatttagaagttctacctttactactttggaaatattgacttaatttttgaatttcttcttgtaaagattttatttcagatttatttcctaaatgaactgcaacttctaaatcttctcttaatttacctaatttcttaactctatctgccatattcatattatctaaagatatttcttgttttctttccatcattctgttaatatctgcatcagttaattgtttagttgccatatttcttaattcttcaaatttatcttgaacatactttaaagtaggtaattcatgatcagttgaatcattaacttttttcttataagcttcaaattctggtggtgttataggagagttagataagtatgagatttcaatgatagttgaagattcaccttgtgaaactttcaaatatgtattacaaatttttcctaaaagttgataagtcttaccacctcttttaacttcttcaacaagagccattttgtataatggttcgttatttgttttggaaaatccaatattaactctaactactgtacctggaatacaagtatcaaattcatcacgataaaggaatttttcaagaacagttctagttgatctaattttattattaatttcatcaagtggtgcttctttatagagtgaagggtcatattcatttcttgatctacctggtctacctgcccttgatgaacgttcagatgcatatctcttacttgcagcagcagcatatctatcatcagaataataagcttcatcgtcatcgtcgtcatcatcattatatcctgcaagttgtcttaaatcatcgtcatcatcttcctcttcatcttggtaacgatcattttcatcatcatcatcatcatcattataatttcttgaacctttattattctttctctctctttgtctttttaattctgataatttacttgttttcaacttcttagcagatgaagaggtactttttcttatagatttagattcaactttactctgtttagctcttaatgctaaaaatctacgttctctaaacttttccttctcttgtatacgatcatataagataccttctctcttaatttcatccatttgcattaattgattcttatcctcttcattcttatacttcccttctaatggatacgggtcttcttcggggttcaactcttcaatatcatcatcatcatccccatctaaacccatatcatcatccatgtcttcgtcatcttcaccatcctcctcatcatcgtctaatcctctctttctagccccagctcttctcttcactacattttgaggttcatggtcactttcctcagcagaggagattcccgctaattccaaaagatcgtcatcactgtcactcatggtgttcttgcagaagaaacatcattcaaccagagtgtcgtcttaaacctccagttaatgaaatcatgaaaacttcccataataataatgaagccaattttccgaggaattttcccaattgggcaatttctttgctgacatgtgcttactatcataatgttacaaatattaacagctgcaatcttcttgtttatcattggggagaacctatttaatagccttttacgtagcttatttatcttataagggcaactactatacttttcatcattggagttaacatcatctctcttttaaattcacaacaatgattcaaaataaggtaccaattcagaaaaaatcaataccaactgaatcaccaggtaaaactccgactgcaaagagatctccatctattttagttactgatgttaggaaaaatcaaacaaaggctccatttgctggtcataaattggagcaacaaagatataaggatgaaaaaaataaagatagagtatctaatttagttaaaagtatgcgtcgtacatcaaattcaaaatattcaaatatatcagtatctaaattaacttcagatataagtgatattccttcctcaagacagagggagactcctcgttttgtaatgactgattcgtttggcccaaatatatcatctcaaagagttcctcaatatgttaaaaatttaccaagtcgaacatcaaaagtcacacaaaaattagttttaattcctgaaaataaattaaataactcaattgattcaaaggaaaaatcaacaactgaaaatatttttcaagaagtttataatagaacaaaggcagaaaaattaacgaaggaacaacgagaaaatgaatatccaagagttacagcttatttaattgctgaaggttttaatttaaaattaacttcaaaatttttagctaaatatcatatggttttaccaagattatatgatgaagtattatatattccttactcattacccttattacctggtgataatggttatagagtccaatcgaatacttcattgaaaatgcaacgtggtattcaattaatggaaaattttataaacaaatcagaagaaagagattatcactatgaattttattcaggtgctgataatgaaaatgttgaaataactgaaaattcaagattattatcaacttctccttcaaataataatgattttgatccatctgaacctcaatattttgtaagttcaagtccaactgagagtatgatagatcaagaggatcgttcaaattcgaataattcaactacttcaactgaatcaaatacaagtatgagtactgatcctaataataataacaatgctagtagtggaaatactgatagcaataattcaactacaacaaatgataatcaaaataacgctacagaaaatataaaagtaaatcaatccgacaataatacagaatcaaacactgaaaagaaaactgaagatgataataaagaaagtaagcaaagcaatggcatttctaacactgatggtaatgaaaatgttaaacacaatgagaatcaaaatcaaaatcaaaatgataatcaccacaaacatcgatatcaacataagaaaaaagtttcaaatttacctgacttatccaaacatgctgaaatgtttatcttagactatggtgttgttgttttctggaattttagtgaaattcatgaaaaaaatatacttgcagatttagtatttgctaaaattgaacctggagaatttgatgatgaggatgatgaaagtgatagtgaaggtgatgatgatttatttgatgatgatgaggatgatgaatttgaatatgatttaggaccacctaaagttgataataatggtgttaaaaatgtgaataaaatcaccaagtatgatagtatctctgaaagtgtaatagatgatgaaaatgatgatagtgatgatgaagttaatgaaaaggaagaattatcacttataataaaacctgtacctgaacatgatattgaaacggaggaatttcattttgaatataatagagatgttgcaactccacgtatttataatgatatgattacattaaaatctggtgatcatttgattaaattaacaatgtcacatgcaattgcacaatcaacaaaattatcattatttgaaagtaaaatgtctaatgttttaaattctatttcaaaacttccaaaagctttagccattactggtaaattacaaaattatacaactaaaagattattaactaaaactggtagattgtttcaattacgtagtgaagtcaatttattatcaaatgttttagatacacctgaatatttttggtctattgaacctggtttacatccactgtatactgctgttagggaatatttagaaattgaacaaagagttgaagttattaatgatagatgtaaagttttcttagatttctttgacattttatcggattcattagctgagaagcaaatgactaaaattactaaattattaattgttgcaattggtttaagcgttattgtttcaatttttgaaatttttatacgatatttgattatttctaaattaaagtcataatagaactagaactagagatacatttttccaaactttatagaattaatgatttattatcatatttcattaaaaaaatatcctttataatatttatataaaaaacctttatttaaattagaaaactgtactattcaatttattaagcgtaaatttatttcttttgcttaccatctgggacagtgaagaaaacatatttaccatccttattagaatccaagatataataaccctttctttcaaattgaataatatcaccaaccttcatttgttcaacattaacatcagcaacggcttcagtgacaaatctagtttcaggagtgaggaaatcttcaaaattatcaccttcatctaatttatctttagtaattaaatgatcaaaatcaactaattcaacattagttttcttttcagctgctaaccaagttaatttcttttcagtttttctgaaatcaccatctaaatgtaatttagcatcaatggatgtaaccttaccatcagcatctttatgaactttttcacaaataacattaccccaatccatgaaagtaacttcttcaccatctttaattgcagctgcatcaacttgttcaattaatgccttagatgaataataaacatctttttcaccaactgcaggatttttcttatgttttggtttcttttcagaatgtaattcaggaccatcaacaatattaacggtaactaaatcctttgattctaaagctgtatgtcttggagcaattggatcaataactttcttatttgcagaccaaataatattccaatctaaattaataatatttttagaaggaccttgagagataataaaattctttaaaccttcaacagtcatacctcttcttctaatacctctaacagttgggaatctcggatcatcccaattaccaacataacctttatcaacgaaccattgtaattttctctttgataataaagttctaacgaaattaactcttgcgaaatcccaaatatgaacttttcttaaattgagagcacttaagcatccaatcatattgagcatttctatctctatattcaatagttcttaaagcatgagtaacaccttctaatgaatcaacaattggaacacagaaatcataagttggatacattttccattcagaaccagttctatgatgaggagttaaattacatctgtaaataactggatctcttaaagttttattaagagcagtataatcaattttagctctaagacaattctttaaaccttcttcagtaccatttttcatttcttcagtgaagatttttaaattttcttcaactgttctatctcttctttcagatttaataccatccattctttcagctctcattttttctaatggagtatcatcacaataagctttaccttctttaatcatttgaattgctaattcatacattttttggaaataatcagatgaataagtaattttatcacctttaatacctaataattctaaatcttcaataattgaatcttgaaattcagttttttcctttgaaggattagtatcatcaaatctaataattaatttaccatgataagcatttgcaaaatattgatttaaaacagctgctttagcatgtccaatatgtaaatatccagaaggttcaggtgggaatcttgtaacaacttcaccatcctttgcatcaataagatcaatttcaaaatttgccttatgaacttcctttttaccaccttttgaaatttttttcatttcagataatgaagttgataataaagttgccatttcaccgaattttttatcagattctaaaaattgataccatcttgtaacattaatatagacagaatttttaataactgaacccatgacaggattagctcttaaagcaccccaaacagcgatatcagcagctgaagctttataaccaacgatgaaagatcttaaatttaaatgagcgtcaagtttctctaaatcaattgctaattttttaaaatctttaacaagtaatttttcataagagaaattaatccattcctcagaatctttctttgctaagataacatttggaaattcagttgctaaataatttaaaatttcaattgaattagttgaaattgattcatcaccttttaaaagttgagcggaagttgtaatttcctttgaaattgtctttgaatcaaggaaattaagtttaatattaccatcagatgaagtattaatgaatgcagcagcagacatcaatgcataatcaactgcaggtgccttaccagcaatagttaatgtataactcatgacttgtgaaaagaaaaggagttcaaaaagaaagaaagaaatgactccataatcactataatcaaatttccaataaattcatgtcaaaacggaaaaaattgaaatttgtgaaattttcttagcgggtgatgcgaaagatgtgaatacaacatctttctctgttgttgctcagcgggttttgtgtgtttcatgtgttgttattggggggatatgatggtaattgatggctaagatggtggatgtagtgtagagtgagttagattttactgtctggagggtttagtttgggaattgtagtaagtttattaatttaaagagattttgttgataaatattgagtattgaattaactatttgtgaaatattttatgtagttgaaaatactttctaattaaattagccataaaacacaaaactaaccattactaactcttctatacccatctaccagtaatatacatcaaaagaagtacttatttaagagtataacccattataaagagaagaaaaggctcattattattctctccacagacgcagcgtcccctttttgaaaatttattaaatttttccctaaggttttatgcatgcatgaatttgataatttttatttacaatttaatattttcagaaattattatagaacacattcattagtcaaagatggaagcagcatattcaataaagaaattttcagaaaatactacagtcaaaagaccaaaggaattaggttgttattcaattgatattggaaataattataaactagatgattcacaattaagttattattatttatcagataatgatttaaatagtgctgatggaattgatcttaatggaggatttgctaattttaaaaataaaactgaaattgattatggtaattttgaaccattattagcaagtataattaattatgaaaaggaacataaaaaaaaaatttcatcaaagataatttcttggagaggtataattagaagtttaatgcttttaccatttcaaaatagagatcattttgtttataatatagttgtttatgatggtcaattatttatacaaatggatagagaacatttagagaatacatatgttaaatttgaagatttaaatgatattcatagaaaatatacatattcaggatataaatttgagacaattgcaacattaccgaaaccatggtctgaatgtactaggaaagaaattgaaaagagaaataaattagaagttaataatattgaacaatattgtacagttgttaaaacaacaattggttcaacttcattaattttaggagctgaagttgattgtgtttgggattataaaccaaaggatggtaatgatgttttatcacattatgttgaattaaagacaagtttaccattaagtgatcctcaaaaagtatttgcatatgaaaataaattattgaatacatgggcacaatgtttccttgttggtataccaagaattatttatgcatttagagatagtcaattaaaagttagaagtatagaagaatttaagacagaggaaataccattattaataaagaataatccaatgagtgtacaaaaatatcaaaaaaatcctaatttaaaaattgttaataaatcaatgcaatcaattaaatatttaagtggtattttatcatggttagaggagacaattccaattaatgatgagagtaaaacttataaattagaatttaatccaaataagaatagtatgtttataaatttaagtgaaaatacaattgaaaaaacaaataaattacttgcaccatatgttaatcgtaatgatggtggtatgttaacagaggagtttaaaaattggagacaagaattaaagaatggtattaaataagttaattaataaatatagttttaatattagtatataataggtaacaatgaaatatatagtataaaattaagttaaattaaaaacgatggtaaatgctaagaaagtgattaattgatgatgatagtattataattagcagggtataaaaataaaagataagttataagtttataatccctataataaagcagcagcaataccagcagcagcaactaaagcaccagcaggagcaaattgattagcaccatttggagcatcagtagttgttggaattggactttcagaacttgaagaagataaagtagttgaaggaagaactgaagttgaaggagcaactgaagatgaagatgaaccagtaccattatttgaaacagctctttgaacatcaacagagatacaatcagatggtagcatcttccttataatacattaattcataaccactttgagaataattataaggatcattagtattcatacaagcatagaaattaccagcagtaccattaactaataaagtattatcatcagcaaatgaatatttagaattagtaccagcaactgtaattagcaacatatttactaacatcaaaagtttgaggaatagttgaagtacctaataaagtttcagcatctgcatcataacttaaaggttcactttgaggagcagtacctaagaaagcataattaataccatgcaccttcatgattaaaaccaagagtattatcatttaatgtagagttatctgatttaatgactaaataaacatcttcagcagcagtagcaacagcagcggatgcagcaataattaatgagtttttgaataacattgtatgtgtaataaagttttgtttgttttttgtttaaagaagaataaaaaaatcaagggtagatgataacttttaagaaatatggggaggataagtccttttatagaccaaaccagtaaaacatttcagctgaaaaaggtacgataattgcgaaaaactatgactatgaaaatggaaatgaaaatagattactaaaaatagaaaattaattataatgacataattgaattgaattgaaaaatattcttatttcaaccagccacttgaattttattttatttttagaagtcggtgatcttctctatcttctatctactggtcatcatcatcatcatcatcaccagtatcacccccaccagtcatttatctctacataattccgttatgtttatttacaaaacaagcattatagaagatctttctttactctaattaatattattcttctatgacgtattcaataaatttttttttaccgcttgtttacgttttactcttttaagtaataatatgggttctatcattatatttatatcactatacaaaactttaattaatgtttcttaacaacaccactggcatctgccttctttaaaatatatttcttataatcttcaatactaccatcaaatctgtaaactgtaccatcttcactaacccaaatttctttacaaacttcattaatcattgtaacatcatgtgaaaccattaaaactccacctttaaaatttttcaatgcagttgctaatgcatctaaacctgatgtatctaaatgatttgatggttcatctaaaattaatatatgtggattacttaaacataatccggcaaatgcaactctactcttttgtccacctgataataattgcattttttgtaatgctaatgatcccgttataccaaatgatcctaaatgacgtctatattcttcatctgtcttaccatgaaatttatcattcatccattcaactgcattcttatttaaatccattccatcgacatgatgttgtgcaaaatatccaattcttaatcttgtatttttagaaacactaccatctaatggtatattattacccattaaaacttttaataatgtagttttaccacatccatttgcaccaactaatgcaattctactatctaattgaatatcaagatcaacatgatttaataacaaattttttgaatcatatccaaaactaacatctaataattgtaaaattggtggtgataatggttctggatcattaaatttaaatgtaacagttttctcctcctctggtgcctccaaaactggtaatttctctaatttcttaattcttgattgtgcttcactagatttagctgcattatatctaaatttatcaataaaagcttgtaaatgtgctctaactgccatttgattctcatattctttcttttgaatctttaatctttcctctcttgtattatagaatgaatcaaaattagcacctctataataatctaatctttctgaatgttgatgaattatatctgttgcaacttcatttaaaaatgctctatcatgtgaaacaactaatatagttgcaggatatgtttgtaaataatcacctaaatatgcactagatggaacatccaacatattagttggttcatctaataataataaatcaggtttacaaaataatgctcttgctaatgataatctcattctccaaccaccagaaaatgatttagtttgtctcttttgtgcctcttgactaaaacctaaaccaaataaaattgatgatgccctagcttctgccttatcactctcaatttcacttaatttttcatgaacttcctctaatttatcatttaaatcagattgttcattctctaatttcttcatctctaatgattcctcatcaaattcttcctttaatttctcaattgtggtaattctttcttcaatttgtgtctcttcaattaataattgttttctccaaacatcagcatctaaaactgattgtaatgcaattgtatcatcacctctaagttcttgttcaacatgtaaaattgtaatatgtttaggaatatctaattctcttcttgataatgctcttaataatgtagatttaccaataccattttgaccaactaaaccatatcttttaccatatgataatgttaatgatgcatcacttaaaattctttgaccttcaccaacatataaatcaaatgtatcaatcttaatatctttacttttacctgcacctgcaccaaattcaattggattaactttaaggaaaaatgaatcataatcatccttttgtgcatcattaagtaatttggatgcctcatatttaacaaattgattatttctctttgcaacttttttagcaattttagcttcagccttttgtaatttcttcttatcaactctactttcaatacttctacctgtatgttcaatatcagttgattgtaataatgctaatgatgaatccatttctctttgtttactattaagtaatccaatatctaataatctctttgatgtatcaccagtaatttctaatttagccatattatcctttaattgtttttccatattttctcttaatttagaacttaattgtttaactttagtttcatcaccacctgcactaattaataaatcttcaataaatgaaacttctttaataatatctaattgttgtgctaaaactgcatcttcagtagatttcaatacatgttgcatataaccaacagcataatcagcaacaacggtatcaatagaccctgcagcttgtctaacttgtaatcctagattcgacattaccctacagaagaaatcaagaagattctctcctatatatatcaactcttccaattaatggaaattcttcaagattaaaaaaaatatttttcattttctttattacgtaatacactactataaagtactattctatttaagatacaattggactttccttttaccagtgaaatcatcgagaactgattcaatagagacattgactttatcaaaaacggagacagttctcttattaccactcttatcaacaaatgttaatgaataattactttcatcaaaagatgaagaattaacatcacctaatacttctaatttaattaaactttcaacaccatattttggtacaagtacaacaataccgttagagaaaacttttataatataaccttcttgatcactttgattatttttcataacttgtccaacataatattcaatacttgctctacctgcaaattgtgcatttctatgtcgtttattaatatttttaacaactaaatccattttagatttatccatatgaatttcatgtaatggttcataatcaattgcagccgctaattgtctatgtgcaacaatatcacaatatctacgaattggtgatgtaaaatgtgtataaatatcaactgctaaaccataatgtttaaattctgcataactaaaattacctgatgcaaaatattctgctgctaacatacatcttgttgccataattctaattaatgtattaaaatatggatcattttgaatcaatacatctatctaatgaatctgctaatgatttactactctctgttgaaattgataatcctttctttaaacgtaacatatcatttaataattcaaaattagttgcaggtggttcaccatgtcgacgtaacattgcaacttgcgggaatgaatcataaattttccttgcaacagaaatatttgcacataacataaattcttcaactaatgaatttgtatctaataattttttaatttcaacttcatttggatcagatgtttcactatctgtatgaactttaacttcaggtgatgctaaatttaatgcaccatttgctaatctttgtcttttcaattttttcgataattttaataaaattctcatacctttagttaaatcatcttgctttttttcatcatcaattctaatttgtgcttcctcatatgcaaatgcttcccttgatttaataattgatttaaaatattcaacattaataatatttgcatcttcatccatttcccataaaactgaaaatgcaaatctatcaacataaggttttaatgaacataaatctgtacctaataacattggtaacatatcaattcttttatcaactaaataaacagatgtacctcttgatgcaccttcttgatctaatggagtacctgctttaacaaaatgtgtaacatcagcaatatgaacaccaacttcataattaccatttggtaatttccttgcatgtaatgcatcatcaatatcaacacatccaggtggatcaatggaacaaattaatctatctcttaaatctcttctctttttcaattgaatatcaccattatctaaattttcaggtactttccaatcatgtccctcttttggtaaacatgataaaacatttttagaaaatggtctatattcaacatcatgttctaataataatgcctcttgttccgcatctttatcctcaatttcacctaaagttctaacaaaatgaccagatgggaatttagaattagaattccaactatcaattgcaacaacaattcttttaccaattaaatcatttgctcttctagttctaattctaatctttggtaatgatttatccattaaaataacaaatacatttcttggagcattactaataagatcagtatctttattaattgaatttggtgataattgtccaacatataatctccaacttctctttattataccaacaactctaccagttggcatgattttattttcatcatcattatccttaccttgttccttaattgcttcttgagttaataatcttctctctttatcagaaatcaatacttcatcttcatcattatcacctaattcatttttattaattgtttcttcatcaataatttgacttgaaggtttcttccatttatttttaggtaataattcaacaacaacttgatcaccattaaaagctctatttaaattttctctacctaaaattaaaagtggttttggtaaattatttacattaacattaccttccaaaaaattatatgaagaaattgtaatattaccctggtataaactaccatttttaataccacccattaatctagcagaggaataatattctgaatatttaatttcattgattgatttatcgaaattttcagttgatggtaacatatcctttaattcaattgaattcggtaataaatcaatatattcattaagtgtgaaagataaaatattttccccttgagctaattctttgttagccttatcggatgtaagtaagattgttttaatattatattcagataaatgattgttataatacttagcagtttctctaattaatctatcattataatcatttataatttcaccatgtttccttggaatataagtttcaccattaaattcattatagaaaacaacaaatcttttatcttcatttttagttaatgttcttaatcttaaatagattggataactttgatttctaacttcattaagaacagtttgaggaattataacatcatataaaactttatcattttccaatatatcaatagcattaagaacaatattagtatcaactaaaatatagtgtttaccaatattcaaactagaagatttcaaatcaagtggagattcagatagaattggattgggaatttcaccatttggaccaggtttatagaattcattacaattttcacaaattcttgaacaacatggaatatctgatcttaaataatgttctctaacaatctttgtagcattaccatttcttgatttgacataaactttttgagagacatagagaccagaggagactctctttctcttaccaccaacagcagctgtagttgtcattgttgtctgtctgcagtgtctttaaataaagaataatgtctatttcctaaagtaaaattaaatttcatgaaaatttttttacttagtgattagctaagtattaagtattaagtattaagtattaagtattaagtattaagtattaagtattgttaagtttataaagtagtatatagaagtataacagactattctctattggatagagcatcctctctcttccaattagcaatccattcagcagaatccactttaggtacaaagtaaactcttaaaatattatcaaataatggtatacttacatctttagacataagtaatgaattaaatgtaactttcttaggtattttaactaatccaccatcctctgtctccatatatgcctctaatttctttggcttaaaattatcatgtttaccatcatggaaatattcttcatttctatcattcattactaattccattaattcatttgctgttgttaattcacttacttcacttacaacatcaaattcatcaactgttggatatattataatagttggcataattaattgtgtctcaatatcatgaacatcctctaaatgtaatttagcatctcctatagaatctgtaccatatgatgatttgatagaaacaatatttctaacttggatagctttctctaaatcttcttcaactctaattctttcctcctctttcaatctcttcttctcttccttttcccttatatattctatcttagcattaactgttttaattaatgaattaactgcaatattcttatcatctatagaataagcaaattgtaaaacttcctttgcttcatcataatgttcaattgcaaaatatgccttagcagctctaaataatgctttaacatttttaggttgtctaattaaacattcctttgcatcattaatacatcttctataatttttcaattctaaattacatgcagctctatttaaatataatgctgcctctatatgtttaacattacaacaaacattaatacctttagtgtaaaattcaactgcatctttataattcttactcttataacgatcattaccttgatttttgaaattttctgcaatttcatcaggttctccttcatatgctaatgattttaatgcttcaatctcaggtctatcctctgtatcttctccttcattaagatcgttcatgaaaaatggtaatttgtttaattctgccattatttcttcagttgatttagatgaaacttctgctatttgtggtggtaattcaatatctccattatttgaagtatttggttctttctctttcttcttttccttttcttttatttgagttttctcccattgatcaaccaatgcatcaacggttgcctcatctatctcttctatcttagccatagttattgtctatgatacacaaacaatacaaagaaaaaaagacttattaaaaattatggaaaaaatattttctttttgaaatttttcatgttctctatacatgggtttctattataaaggtctattatactaatactacacaatttattcatctttccatttataaaacttcttgtaatcttcataaatattcttgaacacaacacgactctgttgatcaagtactttattaatgaaatttaattcattcaatgttaataaatcaatcattttataaattatattatctaatgatggtttaataattatattaatttgatattgtaaatagaatttaatataattacagattaaaattggtaaatattttcttaatcctgatttaatctgtaataatgaattatttatatctgaatccttagtacttcctccattggatattgtcaatatattttgtgtattaggttcacataaattaccaactaatctctcaaatgattgtgatccttctatcttcaattcattagataatttgaatacattcttcattagggaaataaatatattattaataatatgatgtctattagttaatctatgtctttgatataatataaatgatgaaattatttgacaaatgttaatgaaatttccaataattgtatcatttgttgatattttaatcaaattatcacttaaattgtttattaatgcaataactaattccattgaatattgtgtaaataaccaaattttacttgatgtaatatttttcaaacattccaataatggtgcaatgtctttaaattgataatttaatgattgaaatttagtgaaaattgtggaaattgaatagataaataatttatgaattattttaataccttcatttgatggtttatttaaattattaattaaactagttattatttcaatgtaacgttttaaatcttccatattatcaacaattttaattgattcacataaacttattaatgtatattgataattatctctttgtgaaatattaataatataattattaacaaattcatataatttatcattatttaaaacaacatataatgcaaatacataatttggttcataaaattcatataatgaacaaatatatttgaataataataatttcatttcttcatcatcagatgaatataataatccaatcttactaattataagtagaaatttgtttgtaatcattattttgactatcattttgaattccaatttcacttaaaaattcaataagattttttatcacttgaacattcattttcttatcattatttaataatgttaataataatttacaaatattacttgtacatgtattgattaattcacttcttttattttcatcaaatttcttattattttcagtttctttaattaatattgatgcaatgattaaatatggtttcttatttccacaatttttctcagttaatgaattaaatgtattacttacttcttcttgtatattattcaaatatttaattgattccacaggttgttgtaaatgaattttgaaaatgattttaataatttcattatattttaggtcatcaaaattagctaattttaaaagtgaatcaaattcacattcaatcttagatttaaatgttggtaattgaagtaagtttttaataattgtaatagtatatgattcacttagatgattcaagcataaatttaaaacaacttctctttgagatttattcaatgcataaactgaaatatattggaaaaatttcaatttaaaactttcatcagaaattaaattttcaattatttgatatattatattaggttgagtttgaattaatttatgatttaaaatagtgatgaattgatcatctgatattgaattaatacaatttttcacaattttaccaatattttctctatcaagtacattttcaataactaaaaaccatcttgtaaatatgataaatttaaattctaaacttgatgatttcctataataagaaactaaggattttttaaattctttattaacatcatcaatatcatccttttgttcaataattcttaagattgtataaaaaaaataatcttccttaacaattttattattttcaatttcattaataatatcattttcaatttcttcaacatcaaataatgtaagtatgtagaatttcaatttccaagtgaatttaccattaattttcaataaatctataagaattggctttaattcatgtaatgtaataattaatgatttacttaatgaattttgaattgaacctgaattaccctttaataaacctttacataatgaaattaaaaatactggataattatcaatagatgatttaaataattcatattgagaattaagtaatttagttaattgtaaattagataatttgattagtttatttgaaacataatcaattatttcatctgatttgaaaatattggaattagaatatggatcttcattgacaattttattccataaatttataaatgtttcaatttctctgttatttgaataagaatctattaattctttaaataatgataatgttaatgaataatattcaggactctcaattgaacataatttaattatatcatcagtatatttaatagcaacatctgaatttcttttaattgcataaataatcaatttataagattcttcattagataattccaatgctttggaaactaatgaagaaaggaaatcaaatgataatgatttattcatctcagttatttttttcaataatattgaagaatattgtggaaatgaatttgttaataatttaacaattttctctaattcaattatatcaattttatttattataatttctaacaagtaaacaatatctaattcatttaataatgaattatcagagcaagaacaaaatttctccatgtatttaagtatattggaattattatctatagtgtttgtatcattattatcattgaataagaccattttaatcattttttgcaagtttttaataaccatttggctaccattagagatttcacgaatggatataataacattacctaaacaatgtaaggaaaattcagatttatgtttagtatcatatttcaagggatatctattattaatcatgaaaatatcataaacaagtgataaaattcttatttttaaatcatttgaataattgctaccacctataatgacaaaattaagtaaatttttaataattgataaattttgatcatcagatatatgtaatttattatgactatacttgataatatattgaatacttaatgataaagaatcaatatatttaatatcttcatataatttcttttcattgatatcattcaataatttagagaaaacttcagcaaattttaattttgaaatagttttcaatctcataattgataatgattgatcattattacattttgtccatgtaaaattgaaaagttcccaagtatatgcactatatttaaatgttgcagagaggttattagataatgatattctactaataatcaattcaagtacaaaattttccttatttggtaaataaatgttggaatctgtgaataattttgaagtgacaaattcatagataagagacactgaagtgtccttgtttcttaaaaacttagtaatctccccggtactgtgtaagtctataccttctataccgtccattacctacttaattgtctctatatctatactaaaacaaaagaaataaagtatctaaccagtaaccaaaatgaaaaaaaaatatttttcacttgaaaatttcatgttgagtgaatgaaggttttcttaattaaggtgtttacactgtgtttcttcatagaataagggtattatggacagtgaagaggagttttacgatatagacgatcctactggagtgccagtgagacatttgcaatttgatgatcaaagtaaatcattgttgaatggtaatgatgggaaaactagattagcaattgataataacaatcaacatggtgtattgtttaagaatggtaatggtaagaaagatagtaagaataatctatttgaattcgatttattacctccaatggacaaatctgaggaatataccactttcctaaatgatgtgtataaggattatgaatttttattaaagaataaacaatataaacattataattgtaatgatgaagatgatgaatatatgcaaataggtgttatctctaaaattaaggaaatgaaagaggagagagagtttcaatcaaggaaattgatgagtaatttatcaatgcatttacaaaaattaattagagataagatgttgaatattggtaatacattaaatgatccatggattattaattatgaagaagttaataatgtattaaatttaattaatgctgttcattttggtaaagaagatgaaactatcatattattacaaaattggattgaaagggtggaaatattatcaactgaagaatattatgaattaatatcaaatgatgaagttgataaaccttataagagtcaaatattttggtcaaaatatataaataaattaattataagaggttcatttggtttaataattaaagaattaacatcatgtcaatttgaagagttaaaggatagtgattatgatgtttataagttaattgaagatttgattaatttaattaaatcatatgatgtaattgaatttagtaaagatactaagaaatttcttagatggaagaaacttgcagttgaaatgagagatttatctactaatattgtttctcaaaatgataatagttttatcttgattgaaataattgaaattattaatatattatcaggtagtattaaaacaattgaaaataatgcaaaatcatggtatgaagaatttatttcattatatttatatcaaatgccaagtttaaaattagttaaagaatatattaataaatcattaaataatgaattatttgataaaccatttgaaggtattgaaaattgggaaaatatttgtattgatttaatcaatgggaaatatttaacagttatttcatcaattgaatcattagataaatcaattggtacatatattgcaattttattcaaggcaagtggattattaattaaatataataataataaagaaggagaagagaataccaatactcctagtataagtaataatattgatagaatgattgaagatttatcaatgacatatttaaatagtaataataaatcattatttacaattggtgttggtatattaattaatattggagataataaaagtcgagatatattaagtgaattattaccaatttttgaaattgaagattcagatgattatgaatggataatttctatttgttgtgaattaaaattgaataagacaatggagaaaattcaagaaattcaaggtgaaaaattttattcaaaaggattattaattaattcattaaaatgttttgcagatgcaaatgccaaggataaagttgtatcaattacatggagatttttcgaagaaatattaattaatggaggtatgaaggatgaattaagttatgaattatttaatcaaagtcaggttgaaaacagttcaccagttttaagacaagcattatcaccaatttggatattaaatgaaataatgaaatatagattcaatcctgataaaatatggattaatagattattaaacttatttcaattcccatacttaccatcatattataaaccaggacttattactctcatatatgataatcttaacaaaggtatatttcaattaaatgatcttacagatataattgaagaattgaacaattacgaaggggagaatgagagagatgaagagataagggatagatcactaatattctacgagatggtcaacagaggaggaacgtatccatccactgtagagtcactgatccatagtacacgtcgtagtattgccatggatatatcatttaccattactgaagtggacgtcttagaggacgtctctgagagaggaagttttttcatcaaatagtgggtctttctctataatgtattaagcagccattcttttattctttcttttatataagtatatagtatacgtagataaccatggataaagaatacgataatgttattaaactaagagagactaatcaacttaaatgtctctatacaattattcgtaataagaacaccccccgtgaagattttgtcttttattcagatagaattatcagacttttagttgaagaaggattaaatcaattaccaattgaatccaatattattgaaactccattaaatgttacttatgaaggtagtaaatttaagggtaaaatttgtggtgtttccattattagagcaggtgaatcaatggaacaaggtttaagagattgttgtagaagtgttagattaggtaaaatacttattcaaagagatgaagaaactgcaactccaaaattattttatgttaaattaccttcagatattagtgaaagatatgttttattacttgatccattattagcaactggtggttcagctgcaatggcagttaatgtccttttagagaatggtgttaaagaggataaaattattttccttaatgttttagcaagtcctgaaggtattaaagttttcaaggataattatccaaagattaagattattacaggtatggttgatgaatgtcttaatgatcaaaaatatgttgtacctggtgttggtgattttggtgatagatactattctatctagatatagagcgatttatattatattatcctatataacacttctttctttaggtaagactatgaacttctataatcaacctattgtactagataatggatcaggtaatattagatgtggattctctggtgatgaaaaaccaagagtttcttatagtaatataattggaactccaaaatataataaaattaattatttacccaactctattaagcaaaatgatacttttgttggtaatgatgcacaaattaatagaggattacttaaactggtatatcctatagagaatggtaatattgaagattggaattcaatggaaattatttgggataaagtattaaaacatgatttaatgaaagataatgaaattaatttaaatgaacattcaatattaattaatgatgaaatatttacatcaaataaacaacgtgaaactatttgtcaaatattatttgaaacttttaatataggtgcaattaatttatcaataagtaatttattatcattatatgcaatgggtaaaacaactggtgtaagtgttaatattggtgatggaatttgttcaattgttaacatatttcgatggttatatattaccaaatagtttaaagagaattaatttagctggtagagaaattactaaaatattgaaaactgaagtcacaaagaatggttatttaatgaattcatcatcagaatttgaaattatacgtaatttaaaagaaaggttatgtagtgttaatatgatggagaatattgaaaatggatcacaatctttcccattacctgatggtaaaaaacttaatataactaatgaatcattaaaaaaaccatgtgaattattatttaatccaataagttttggatatgaagataatagtatacaagaattaatttataaatcaattattaataatgatacagaattaagatttaaattatttaattcaattatacttagtggtggtagtacatgttttaaaaattttggtaatagattaattaaagagattagaaaaattgataatgaaattggatttaaaatatttgcatcaactgaacgtaaaaataattgttttattggtggttcaattatttcaagtttaagtacttttaataatattgtaataagtaggaaagaatttaatgaaaatcctcaatgtgtttatgagaaatattattaggtatattataaaagataagaataagcagaagaagtagagaaccgtatatagataaaatacataaattaagaaataaaagagtaagtttaaaggtgatagttagttaataactctcattatcatcatgaattgtacaaacatcaataccgaaaatttcatttgttgaataaccattaattgcattaggcttattattattattattattatttaatgattttgtagaacttgaactacttggatttgaattaattaacatcattgaatcattaattgacaataattttgatttaatatttaatttacgtttatttgaataattaattggtgatgtataaaaatcatcaagatatgaaggtgaagcccaaatttttttatttaattgtaattgatttatttgattagttttaattggagtttgttgtaatttattattatttggacttgatggtataagtaaaagatttgaatttggtgtattattattagttgttgaaatttttttaattgaaggtatttgaagttgttgctttttatttgtattagtattagtacttgtagtgaaaattatattattaatattattatttggtgtcattggttcaagtattggaccattatcaatatttttaattggacttaattcaaaatttgccctacaactaaatgatgatgtaaaatctattgaattattttgtggtgttaaatcatgaatattaattggtgatgcattatatgatgaatattgaatattaagttcaggtattgaacctagggaattattacgagaatgagaatgggaatataatgatttattgatataattataatgacgatgtgataataataaattagtgttttgtgtggtattggtattggtattggtattattattattattattattattgttgttgttatttgatatttctgctgtgtttttaggtgtttgtaataaattaatctgttgattatcatgtattgatatactatgatttgtaatattacaatcattattatcatcattactatcattactttcatcatcagtttcagatgaattattatttggtggtattactttattagccatacttctctttgattttttaatattacaataaatatattcaaaaccatctttaattttccaaaaatgaccctttttatcttttgatttttcagttttttcaaaatttttatttaatgataaattatgtctaattgaattttgccaaccaacttcacctcttttataatatttaaaatttaatgaaatccaatcataaatttcagctaatgttaatcttctatcatttgatctaagtatagccataccaattaaagttgcataagaataaggaggtttattagttcctggaaaggagattattggcatatcttgaggagatggtagtatgaatgatgatgatggggtattattattattattattattattattattattacttattttttgacgtttatttggtaaatcaataaattgaggagcttttaaaggttcaattaaagaattattaatattaagattaatatctatattaggagatgagaattcaggtgataaaagtccctttttagtagtttgatatggagaattattattattattattaatattaatattaatattacttaaagaagtaaaatttgataatctttgagttgaatgaggtggagttttcaattgagattttttcgaaggtgatataatagcaggaggtaataacattgtttggtgataagaagaggtagtagtgaaaggaatagaaataaaaataaaataaaatataataaaatgaaaagaaagaagtaatatctaaaaaagggggggcttgtcaagatatagtaatttaacttacgcttattataattataattataaaacaaacgcgttcttgtattatatatatatataatttattttattaataacgcgtttttattttattttattctagtattttattatagttttagttataaattatgtaatattgattatgtaatatcatagtcacgtgactgattacgtaatgctcacgtgacaattgtaatttcaaaaaatatttcaaatatcacgtgacattacgtaatattataaaatatcggagtttgatttttgatttcttatcattatcattaatctaagatagcatatttttcacgtaattcaactggaataccttcaaataatcctttatccattaagaatttcttactgaaaattttattactatatttatgtgcactatcagctaatattgtaacaatattactaccttctggtaataattttgctgcttcaattgctccaataacatttaatgctgctgtaccaccaacgaaaataccttcttcttcaattaatctatataacattataatagtttcttgatctggtattaaaaatgaatcatcacataatttaatattggctgcaacattacctgtaactctaccttgtccaataccttctgtaaatgatccaccttctttatctaaacttttacccttagttttaacatatgaataaagacatgatcctggtggttcaacaataaaagattttgtattggcattttgacttttcaaatattcagtaatacctgaccatgtaccacctgatcctgatgaacaaacaaatccatcaactttaccacttaattgattataaatttcaggtcctgttgatgcaatatgtgcatctttattatctaaattatcaaattgattagtccaatatgcattttccatattttctgcatgttttctagctaaatgattaaaattattttcattatcaaatggtacaactggtacaggatgaacctctgctcctaataatcttaatgtttccatctttgctggtgattgagtatttggcatataaataacacatttataaccttttgatctacaaatatgtgctaatccaatacctgtattccctgctgtaccttcaacaattgtaccccctgatttaattaaccctctctcttctgccttttcaatgaaaaataatgctgctctatccttaactgatccacccggattcatccattcagctttaccataaatatttctaccaatttcttctgataatttatttaatttaattaatggtgtattaccaacacttttaagtataccattatcacttttaattgaatttttatttaatgtataagatgcaatcttaatactacgtgtagttgaaaataatctactcattacttaaaagaaagaagttattataaaaagtgaaaaaaagtgaaaaatttcaaaatcataccattaaactattctaatataaaataaccctcaccttcatcataatataaataataatgctgtaaaaagaatattgaatcagctattatcacctgaactgcaagaaataactttggtttattatcaaatatattcattatatcattaactaccaatgcatcaataattaattgaattaatgacattgatgcaccgaaaaaatcaaaccaaatcattaaaactggccatccattggtactctttctctcaaaattataaataatttgtggtatattcttacaaactgacataccaattttaattaatcccatatatgtaactaatttcattaaattaaattcaccaataacaaccccccatccttgattatgataaataataattaatccaataattatataactaataacacaacctatgataactttagcaccaattgaaaccttttgactatcctttttactatatcctaaacaatatgcttgaataatcatatatccattagttaataaattatgaacaccgaaaattaaatcatttaccttaattaatggccattcaccattctctaaataaaattcctctctgataatactattgaatatcatacaacttgtatatgttgtatataatacaaatcccatcatattgaaaaatagataatccattgaaataccttcaacggatttacatttccgattatgtaaaattgttggataatttgcaaccccccatccaataacgtaaatccatccaataattgcacttactgtagttaattcaatggtcattgtatgttgtataaagagaagtgtgttaaataaaagacataaataaaagacatataatatatatacaacagcttataaagaaagataaaaactccattatctaaaacccgattttcctctattttcagtcggctgagaaattatatgttgagatattgagatatcgcagattgagcaggccgaaaattatggtttaaattggaaaatttttcacctatattttacaatgattttgaaaagtattttcttttctactagttttatataattttttatattttctttataagacagataggaatcgattctgattgatattaatagaatatattggaataaatttaaattaaacagaagatgtcgaacaatttaaacgaagattcaaatgatcgtatcgaagatagcgatatcgtcatggatgatacaacgaggtatatacatgaaggtatcgagaaactgaagaaagttttggctttaggtgttactggaactcagagagatagtatcaatggatttctagaaagtatgaatattaattcttctttcgcaaattccactgagaacaaagattttggtgctgaaaaatcgaatatgggggggtcaatgggaaggtaaccaccacactgatataactttggttgatatcagtggtatcactgacaaagtgaaaattatggacgctgaaagacgtgatggtgattggatttaccggaaatctactgattgtccttttcacaaaggaggtgaatgcgtgactaaagcaatgaaagcggtgcaagatatcaattatgataagaagttagatgcagcatcaaattttgaaacttggttgtcaatggtaaatgaggcaacaggtcacataaactttagtataattgtacagcaagcattcatggttatcagaaggtcattatctccagtaaacatcaagtggtgtggtttcgcagaaaatgcgatatgttcaattattaagagatcattatctccgaaggtacgtgaacatattgagaagacatgcgttggtccaatggatacatcggtaatgtatttatgtgaagccataaaatttttagatattatagttgatccacgtagactatatgctactgtcatggaaatcaaattagaaaaccatgattacccaaaattttaccaagaattgaaacgagttgatatgaccgcaaggttattaaagatcaacccaaatgctcaaaagtttcatattgatataattgaaaataatatgtcaaaacttccaacagatttgacaatcagattagaggaacaaactctaacttttgaattttttttaaaatatataaatatgaaaaccaaatcttctgattactacaagacgctgaacgtaagtgtaaaaaacaaccttgaaaacacagacaacatggaatttaataaaaattgtttcagatgtggaaaaaagggacataaagcaattatttgcaaggcaacggaagaagaggtaaaggaatatttgaagaagatttcaactacatctgaagagaaaatagcaaaatccatcaaaccattggaggattcaattaaatctttagaaaaatcagttaagttaatggaagaagctattaaaccatcggaaaaatctaaggaacaaatggcaaaatctaccaaacgtaaaaataagagaaagtctaaaaataaaaacaaaaatgagaaggctccagttgaaaaaggtaatgaacaaacaactgctgatcagacagtcgataataaaaaggatgatgtcaagtcttctattaaaaaggatgatgtcaagcctaacaacaataattctattactaaagaaacaaacaatatgaatgcaaacttcaatggtggaataactagattcgttggtgctataaaaattaaaaggattttcattacatcagataactattatggagaatccgataaaagcttcagattaagagaccgtttgatgattgattctggtgccgaagcatgtttattttcaaataaaaattacttcaagagttttacaacacaactagatgaacaagttgaaattgttgctgcaaataatactatgatcgaagttctgggtgttggttattttgagctaggatctgggaacaatataagacggatcaaagcttattacactccttcattacaagttaacatcttatcgatatctgatttattagatgcgaatttccaagtttcattcggtactataaacaaaaattctgcattcattgtggacaacgtcactcaagaaaacattttaaaatttaataaagttgatagattgttctactccgaattcatggttgattctttcgaatccaaaaaaataaattcaattacctggcacgatgctctgggtcatgttaatccaaaaattgttaaagaacatggtcatttagaagattgtataggatgtgatttttgtaaattatctaacattcaagcacacaaagcttactctggttcgcctaacaaatatcaagtagacattccattctacaaggtacacgctgatctatgttttgttactaatggtaaaggtgaggcctatggaaaaactggtaaatacatacttgttttaattgatgcatacacaaatcataaaaccattttcatattggataagaaaagtcaaactggcgataagattaatctatatgcaaataagaccaaaaatttctgggaatttaatgtcaaacgattattcacagataaaggtactgaattcattggtggtcacactaaacaagttattgataataaaggaattcagttaactacaacatctggtcattcttccaaatcaaacggcaaggtagaaaaattaaaccaagatttacttagacaagttagagcattattgaataaatcaaaacttacattagatttttggccagaagctgctttgcatgcaattgaaattatgaatcgccgtaaatatcatcatctagacgataaatctccacttcaatatctttatgaaaacattaatgcttcaaatgaatataatgatgtgccaaaacacatttttggatgcaaagtatacattaaattacaatcaaaagggaaattggctaatagaggaatcattggtgtttatcttggaatgagtcaaacagttgctggtggtcatgttgtatggtatccaaatcaacaatttgaaaacaataccgaatatttgaaaggtttcggggtgatattacatacaatggatgtacaatttgatgaagaaaatttatttatggattatcttaaatctgaacacaattatcaacacaatgccatttatgatgatttactatttcaagaggaagaacatgctgataaccaaatcgaggaaataaatcaattggatacaaattcaaatgaactaccaacggataataatgctgatttaaatgacaatcaccataaatcatttcaatctaacttggatgaaaagaataaacaaccatttcaagtaattgttcacaaccatattaatcccacaaccactgctggtccaaatcatgttgagaaaatcgcggacaacattgacacgcaaatttttacaccaagtcaatttaatcgaggttacactgttgtttcttcttcttccaaaacaaatgatgatcaaacaattgccaatacaaccgataacattgaattaccacatacattaatacctgctgaattaagaggtaatccaaacactgatttaggtggtgataacattaatttaggtggtgatattaatttaggtggtgataacagtaaattaggtgcaaatctacaacagaatttaggtggtgatatttatattgatggctttgatatacaaagctctacaataagcaatgaagtaaatgacgttgttgatgatgatgatgaaaaagatcaattttttgactgctctgatgagcaattatggattaataatgaagataaaaatcataaagtggaaaaacctgcacttcacgtaagtttagatgaaatcatagatgaatatgaaagaacacatttagaagatgacacattagatgaaaatgtagataatactattgaaaatatcaatgagaatacagaaaacgttgatactggtggtgatatcgttcaaacaaatatcgaaaacgttaacactggtgatgatattggtggaaatgaagcgatgttattatttcaaaaaagtttttatgaagaagaataccagaaggagttgaacaaacacctagatgaaataatccatggagataaaatggatcatgaaaatgaagatgaatttattagagatagagatgaacatcaagtaaataaagatgtcattagagatagaagtcctagtagatttagaacaaacatcaagtcaacatatagaaatggtgcagaaggatataatcgccatgaattcaataatgtaaaagtatttaccacaaatatgatatttgaaataaatttggaaaaagatattcaagacctaaaattagacataataaaaatacatagtataaatctaagacaagctatggccagtgatcaagctgaaaaatggattgatgcaatgaaattagaatatggaaatctattggaacatggtacatgggaactagtacctactgaattaatttcaaaaagcgatagaagaaaaattgtgaagactatgtgggtacttaatgaaaagagagacgataaattaaaagccagattggtcgctagaggtgacaatcaaccagaggatacttataatgaaacatatgcttcaacattaagttatgaatcattgagaatattattagctgaagcaacactattaaactttcacatagaatttatggacatttcaaacgcatatgtaaatgctgatattgatacagaaatatatatacaattacctgaagaaacacctttcctcaatgtacaaaattacaaaggacatataatgtatgcacacaagttgaagaaatcattatacggtttaaaacagtcaggacgcaattggcaaatgctgttggagaaggttttacaaaacataggttatgaaaaatggtctgatattgaatgcataatgagattaacagatgaaaaaggaaatgtagttggtttaattggatattttgttgatgatttaataatcacaggaaaaccggattatgtgaaatatactatggataaaattaaagaaacttttaaatgtaccactagtgaggaagatactgaaggttatagaaatattttaggcattgattgtaaggtagaagaaggcaaaattgagataaatcaaagaaagtatattgaaaagttttgtgaaagatttgaagcaactggaaagaaatataaaacaccactagaaccgggtttctatttccaaccttacaataaagatttgggaattaacattaaagaattaaatgaaagaataaagtggatgagaagtgcaattgggggattattattcattgctggtgcaactagaccagatattcaatatgctgttaattatttagccagattcgttacagttccacatgacgatattattacacaaactaaaagagcaataaactacgttttatgtacaaaggacattaaaattgaatttagtaatataaataaaccaatgttagcattctcagactcggatcattcaggtgataaatcagattttatttctagcaaaggaacaatgattacatatgccgaaggtccaatcagttggagatataagaaaggaaaagtttgtcaaagttcaacagaggctgaattagatgcttatattcaatcttgtaacatggtaacaaaagttagaagaatattaacttttatttacggctttgatataaaccacaacttggatagaccaacagacgtattttgtgataacaatagtatgttacagattgtaaatacaggtacagtatctcaaagaacaaattatctatctcaggatgcatgtgtggcgtatcaatacatcggaaacaaaattgttagtgcgaagaaagttgatacagaagaaaatttagccgatttacttactaaaccaatatctggtaaaacaatggaacatctaactaaaattatatttgcaaatgaatcatagatagattgatacattgatttaggtggtgtgttgagatattgagatatcgcagattgagcaggccgaaaattatggtttaaattggaaaatttttcacctatattttacaatgattttgaaaagtattttcttttctactagttttatataattttttatattttctttataagacagataggaatcgattctgattgatattaatagaatatattggaataaatttaaattaaacagaagatgtcgaacaatttaaacgaagattcaaatgatcgtatcgaagatagcgatatcgtcatggatgatacaacgaggtatatacatgaaggtatcgagaaactgaagaaagttttggctttaggtgttactggaactcagagagatagtatcaatggatttctagaaagtatgaatattaattcttctttcgcaaattccactgagaacaaagattttggtgctgaaaaatcgaatattataacattgtatactctactacacttattgaataccaattatactcaattctaatgtccatacacgtcttatattgactttaacacctgtaattgcattaccattgttatcaactaaccctaattcactaatatcaacttcaacagtagtattactccaccaacatttccttgctggtttcctccaaaataataataatttagtattattattatttggtttactactactactacgtactttactaccagctcttgaaattgattgtgctaatgtacttaaccttgattttctcttttccttttctttactatctttctccttatgacgacctctctcttcaactaatgatgtacttgatgtaacaggttttaaatttggtgaatccgttggagaattaatattactattactattatgattttgattattactatgatgattattattcaatcttgctaatgataatgaaaaaataactgttttaccaggttctaatgatctatgaccccaaatttcatcattttgaaatccacttgaacataacatatccattaaatgttgttcagctggtttaagttgtttacctgaaacataacctaaaccttgaaagattttattaaattctaataatttttctccaataattaattttaaatgtctcatttgttcaacattcatctttgcaattggtggtataacataataatctaaatcttctctaagtacaataattgatggtctatcattaagtatatttggatcattaatatcaaaattagtattatttactccacctccattatgatattctaattcattaattaaatgtaaatctttaacagctttatcaaatatattacaaatatattggaaacattcaggtgggaaattaacataaacaatatcatcctctgttaaattattaataacttgcccatccattccaatgaatataccattaggaaataaacataataaaatactttcaggtaatgccattaaatcatccctagtaattgtaaacatatgtcctctcatattcattttaatttcaatattataatcatctgaatattcatccccaccagcaggcataaacattcctccattaccatcctgggtaacttgtgtaactatatcattatgtgacatccttgtccctagataatatcctataaacaaccatctaacacttatataccatatagtaaaaattctcccattcaataccgccctatcgcaatttcttttctcgcaattttcatttaataaactcacaaaacatgaatcttcattttaataactcatcttacactgcttttctgcctcttcttaacaccttaactaccaactcctatccctaaatgagttgtataaaaggttcagattgttgtaaaaatttttcttctgaagaaatccctgtaaacatgcatttattaaataaattaaagaggaaatcttcatcaaatagtataattactaacaaatctgataaatctgatgatatatggaattcagatagtgatattgatgatgagaaaactcttaataatgatataaaagctttgaaaatacgtcataataataaaggttacctcgatgggataactaaaggtaaagattcaggattacagaaaggtttcgatgatggatacccaattggtgctgaattaggtggtataattggtgaattaatcgcagaaactgtttggaggtatagtatgggtcaaattaattcaaatcaaaagcaaaatattttaaatgaattgaaaattgataaaatacttaattctaaatattttgatattaatttacatttatcaaatccttatgaacatccagtaattaaaaaatggttgttattctttaaaaatttacaatatcctctataaaacaatatattatttataaaattaaaatacccactaccagaatgaacaccatccaatataatgttgacataaattttcaacacttgtagcttgttgaatcaatttatcaacttgtattgcaacatctaaattcttactcctcttaaaatcatttccaattaatttatcattgattctctttaaaacacattcagctctagcatctttaacacttgccttataccttattgccatattggctgcttgttgttcagttatttgtccacttttcaataattcattataattattctcaggtaattgaattggtaatcctgcttgttcaataactctctcaattgggaaatcaaacccccaattaattaatggatcatgaataaatgcctctaaaatcgccattaatgaatctttattctctcttaaaactttcataacattctcacttgtaattctaaatgatccttcaattccacttacttccattgcataactcaacattctagttaatctaaatggaaccttctcgggatatttctctctcataatagcactctcaaaacaatcaccaaaatcaatatgaataactttaccagttattctatccatcattaaattacttggatgtctatcacctaatcctaaaatatatccaaccattgacattgctgctaatgatcttgtatatgttgtacgtctatctaaccatgattcacttgatttagatttaaaccataacactttatataaatcttgacctctagttatatccagtgcataagtgaaaacttcgactttttcaagtaatgttaaattatcataatctggtgacatttgtaacataactctatgttcaacatctaaataaatctttcttggatccctatattctttaattaatacatggaacgtatctgaatttggtacccatcctagtaatcccgatgatggtgataatggaattgccgcatatctttgaatatcaacatgtcttttaaaacattccgcatcattacttaataatgtattaactaatccaaataattgcataactaaactatcttgtctaatatcttcatgtgccttcaaaaggaaagtataatttttaccattactacctaaaatatgaaatttacgtggtctttgctttgatgtaataacaatgaaaattgggtcaaatttttgaattttaataatttccttattaacttcatatgtaccaggtattgccaattctaaatcatgtgcatttaataattcaggtgaaacatgttgtaaatctaaattttgtaaaattggtaattgtttactaatcttacggaaaactgtataatacaaatcccatgcttgattaatatatgatgtatcctttgtacgtttaaattgatgtaaccaactatgtgcatcatttaaatctttaccaaatgcattaacaaatgatgtttcacgtatagttgttggtcctttcataattaatgaatttaatggatctaaaattgaaaacatcttatcaacatcatgatcattaaaatatgcccttgatgcatcctctaatgcttcataccacatttcatgccataatacactaactctgattaattcactactaaccatatctgcttgatcaactaaaactgatgaatgtgctctcattttatcaattatcattaatgctgccttttgtcttgaaacactctcactcttaattgcaacagttaatggataaattaatgcttgtggatgtgccctacctaaatcagataataatcctaataatgaatgactaacaactggatcaggttgatgaatatgtgaaattaattgtggtataacatctaaccatgtatctattttaatcattctaataccttcttgtaatgcattacaaacttcagtaataccaccataattaagccataatgttaataatcgtaatgtatcttgtaatggattagaagatgaaagttcaattgaatggaaaaaacccttaactgctggaacaacatatcttaaaattgtattcatattaatttcattattaataggatttacattaccattaccattgacattatttaagaaattacttttagattttggtgaaataacttcaaaatttgctaatgcccaattatgccatgctttataccattttgaatcaaaatgtgttgctaataaaaatgaacctaaaatacttgaagattctttaataatccattcatcatccatttcaattttccattcaccttgctttaaataacatcttgctaataactttgtaaatttttcgatatcatcattaattccaggtacagttttaggtaatggttgagtgattgcttcattttcatttaatcctaaatcatgtgaaagttttgatgtaaaatcaaccaaatgatttaatgcctctgccttttgacctcttgaccacatatattttaattgtgcataaacaacatgtggtgatgctttattacctggtttaccagttgatccttcatctaataattgatttaatgatttttcagctaatcttaatctaccactcttacgacataaattagcaaatttgatccaaatttccatatcttgctttggcttaacaactaatgctctagcttttaacattctttgccaaatatcaacattcttttgacatcctaataatcttttattccatgtatcaattatatgaactcttttctcacttgatggtggtaaacatttatatttgataatttcctctaattcacttaacatttgaacccttacaacaacaccatatgcacgattatatgactcactaactaatgctgtgatttcagttgctagtaaatctcttgccttattaatttgtaatgatgcttcattataattattattatgtaatgataaaatggcattgaagaatgccttatcgggtgaatctttcttcataactgagatataagtatccattctctcccattgacgtaacccccaagcagctgcagctgctaatggtgcaattgatctttgaatttcaggtgtactactactccatttatcttttgctaaaacacttaatgaatcccattcaccaagtgcatgtaaacaacgcattttacccattataatttcagttgaattaggttcctccttttctctttcattatatgcatgtaatgcatcatcccatctctgtaatttttcataccatgtttcctttaattgtaatccatgatgttcctgtgcatatcttaaaataccaattgcagcatcagattgttgtaattgattgttaatactaattaatgattcaattgttggaattgaaggttcttgaataaattctaattctttataatgtaatgctttagcatatgcatgacttctttgtgcatattgacctagagtttgaattctgattggtaaagatttttcatcatgttctaaaaattctgttaaatttaataatgattgatgaatttctggtgaactattaactgatgataatgcaacacataatgattgagctaattcaccttgaaattgagtatttaattcattccaacaacttgcaaatgcacaattaaataaatctctagctaattgtggataaacagatgctaaaacttcacatgcacgtaatgaatatgatggcgattcctttaataattgaatactaaactttctaatccattcttgccaatcttccttagttcttttagtactacagtcccaagatgcttttaaagtttgtgcattaacagttaatgttttagattgttgttgatcattattatttaaattatttgagttatttttagattcatcatcttgatcagggtaaagaaccagattcgatggtaattgcctacccttattcaatctttcaacaaattgatcgtataatgggaattgtaatttacttttaattaaaacagatgtaacaactggtatgaaaactgaaaaatcagatcccatttgtaataataacgagcaaattgttgtcattgctgaagttcttaaacttgtattatcacatgaacttaataatcttaataatggctgaataatttcacttgcataatcatttaatgtaacatttttagataatttaccaatacaatcaattgatgcttttctaacattcattggagagtattcaaatagtttgattaatgaaggtataatcatataaatataaggttctaaattagatccaaaaatgacaaatgccttcaaaacacgtaacgttgacatataactaacagataaatctttctctagaatacccaagaaaatattaatcaattttaacatataaaatttaaattcatcctctaatgcaattgatattttctctataacaccaataattttagattgtaatttaacatttgggaaaaattcttgaattaattcgaataattggggaaggtaaggacgaatatttaatttgacaatgtctattaagtcacaaatttgttggaaataagtattaagcatagataatggtgaattatgcataacaattgaaaaagctggaattacttgatctaagaatggaacacattttaatcctaaatcttggaaaatattcatgattgcttgagtaactaaaagatgatgcatggtcaatgaattatcctttaatattttaatcaatgtttgaataacaacagtaggaaaataatcatcattagttggtgatttacccttcattaataattccatgtcaataggtggagcattttgtctagcaacagtatctgcatcatgaccctttctttcaacttctctatgtttataaggatctaatgcacctaaaatacctaataatctaacagtatctcttctaacattatttgaagtttgagatttcagtatattaactaataatcctaaaagttgtggataatccaataatggttgaataacataaccagcagaacctgaaatttgtcctaaagttgtaatagaaacatttcttttcaataatgatttttgatcttcaaatgcatcaattaatataggcataatttgaggtatgaatggcataataagatctccactcacttcagataatgaaccaatagtaacaattgcagaagctgatacaattgatgaagaatctagtgcttgaggtagtaatgcatccattatttgctttgtgtaaggtttagttaaatcaccagttgatgaaattaaaatacctaataaaatacatgattcttctctaattctagttgtatgagcaccatattctaaattagtaattaattggattagaattcttcttaaagaaggaacaatgaatgctgggttaaagaacgttaaacgaccaactaatttataagtttccttcctaatttcaaaattttcatcatttaatgtcatgaataataacttcacattttccgcctgggaaagatgtgcatcgaaaacatcatctaataatttaataatttcaagtctaatttcattaactggatcagtaatacaagttgtaagtaactttgataagacaaaatcaacacttttcaatgaatgttcacttctttcaaagcagattgtacctcttctaaaaatttctgcacatgtaactgaagcttgtaatctaatttcataattttgatgtgatgtataatttattattgcatattgaacaaattcatttaaatcataatttttaaattcaaaacatcttaaaacttttaaagcttgtaaaatgacaacgacatcggggtctgagaaaaatgttgattttggtatatttgataattcagttaattccttaacagtattttgattaaacatatcaccttcctttaataacatattatatctataattataagctaaatcttcatcaaataatttttcaaattcaggagatccaggatgcgagaattgataaccggataaggtaaaactaacagtatttattaatttatcattaatcaaaggttctaatgaaggtaaatggattgtgaaaatcttcaaaacacttattatattatcattaattgggaatttaagtaaatatttgagtatttgataagcattaatgaatttagttaatggggctcctaatgagattgccaatttagataaacaataacaaccagctggtgataattctctctgtgtgcgtacagatgattgtgagatactatctctaatagtatcaaatacgataccatttaaataatttataatattattttttgcttccattgaaatatcaccaatactcattaaaattatatttttatccttaccaacttttaattgtgatatataataaagcaaaacacgatgcatatatctatcaacaaatttaattttatcatatcttgctaatttaggtacaatggaacaaatttccttacgtacatcaaaagatttattatctttaactctcattatagtttcataaatttcatcaattttagttcctaaaatagatgtaccttgatcgacaagttctctataacataaaagtgagccatgaatatattcagctggagtgtttattaattgattagcagtatctgaataatctgaattattagatgtattagtagacgcactattattatttgaactggtgatattattttgtttatcaggattttgaatagagctgaaacctgcagctttaaagatactaaaagcttcaccatataatttagtaaaccaataattacgtaaaatattatccctttcatagacaatatttaaacaatgatgtaaacaaatagctgaatcttctctaattgaaacttttggatctcttaaaccaatccaaatattttggaaaatttgtttaatatattgatataataaagcaggagaattttgtgcaagtgaagaaattgttaaaattgcagcatgtttcttagattcaattttttcattaattaaccaatccaaggctcttttaacttcaatttcaacaaaatcaaaagtcattaaagctcctggaattgcaagtttaccaattgtctttgttgcagctttcataactattaaattatttgaagatgttaattttcttaaataattagcatatcttgtaatcatatttgaattttcatcattattattattattatttgaaccaggtagtgaattaatacgattagatgtaggatttgttaattgactaaaatgagtatcatcagttgaagaagaatataataattcaattaatgaattaattgcttcaatacctcctaattgttcattaatttttgatgaattaattaaatcgaatatttttttattaatataattattataaattgtaatttgttcagttgtatttaaatctcttgaaattaatataaaagttgttctcaaattatttgcagcttttaaacgacgaatttcatcaattgattttaattcaaggaatatttgatcaagtgtataattttgcatttcaatagatgtacccgtaggtaagcctatattatttgattgttgtaattgagacattgtagtgattgattatggtatcaatgtcaacaattaatgagttgtttgattaaaattaaaagaaagaaatgggtggtattggatgataatgattgatgggtatttaaaatcaacatggcgtttctcacccactgtgagaaatttacttagtaagtagtctgtctcttactgttaaattactagcaataatattattgaacattaaacatgcatcattatataaataaatagaaagtataaataaataatagaggataagatatgatataagacagaaataaaacacaattaagcttggattctctttaataattcatcataaagagcaacacaatcaatagagaattttctgataccttcagctaatttttcagttgccattgcatcatcatttaataagaatctgaatttagcttcatcatcaacatatgaaactttttctaaatctaatgatttagccttttcaatgtctaaaatctttggtaattcatcattactgttagataatttttctaataaacctggtgatatagtaagataatcacaacctgctaaagctgcaatttcaccagtatttctgaatgatgcacccataacaattgtcttataatcatattttttataataattgtagatgtttctaacagataaaacaccaggatcagtttcttgagtatattcttcacctgttttagccttataccaatctaaaattctaccaacgaatggtgagataagagtaatattagcttcagcacaagcaacagcttgaacaaatgagaataaaagagttaaattacagtgaataccatgtttactttctaattctcttgcagcttgaataccttcccaagttgaagcaattttaattaaaactctttccttagagataccttgatctttatacatttcaatgatttccaaagctttcttaatagttgcttctttatcgaaagataatctagcatcaacttcagttgagactctacctggaacaattttcaaaatttcagtaccaaattcaactaataatctatcaagagcaattgaagcttgttcattagcatcatttgattttgattttgcataatcaattgcaacatcaattaatttagcatattgaggttgctttgttgcagcaagaattaatgaaggattagtagttgcatcttgaggagtgaatttagcaatagattcgaaatcaccagtatcagcgacaacaacggtacctgttttctttaattgttctaattgagacattgttttagtttgttaaaagaagatagagaagataaagaagataaaagacccaaactgaaaagatccagaaagaaacacttacaaatcagaaatgaaattataataaaggacatgtcaaatagaaatagaaatagaaatagaaatagaaatagaaatagagatcccttatagtatttatggggaagtctcctccgattcctttggttacgtaatctttgggtcgatgcgtctgtggagctaattttctattctttaagataccgacatgaatttattatagaaagagacacttaggggtggcaatatattattatatcagagaattaataaggtaataacacagatacaatcacaatgtcttcaattaacacaccggccgttgtcatggacaatgggactgggtttacctaaattaggttttgcaggtaatgattctccttcttgggttttcccaactgcaattgcaacctagaaatagtaattcaagtagtactactaatacttcttcaattacttaataaatcatcagatttatcatcaattaattccccttatacatcttcagatacttcattcctaaatagaaataaaatttcaaataattcaattcatggtaatagagaaatgtcagatttaggatttttatattggtgatttagcaattgatgcatcaaaaggtccttcatattcacttaattacccaatcaaacatggtcaaattgaaaattgggatcaaatggaaagattttgggaaaattcaatttttaaatatcttaaatgtcaacctgaagatcattatttccttttaactgaacctccattaaatccacctgaaaatagagaaaatactgctgaaattatgtttgaaagttttaattgtgcaggtctctatattgcagttcaagcagttttagcattagctgcctcttggacaagttctaaagtaattgatagaagtttaactggtactgttattgatagtggtgatggtgttactcatgttatacctgttgctgaaggttatgttattggtagtgcaattaaaaatataccaattgcaggtagagatattacaagttttattcaaactttattaagagagaggggggaattagattcaagtttgaaaactgctgaagaaataaagcaaaaattttgttatgtttgtcctgatattgttaaagaatttagaaaatttgataatgatagtgaaatgtttgcaaaatatattgttgaaactgtatctcataaaaaagttgaaattgatattggttatgaaagatttttagctcctgaaattttctttaatcctgaaattgcatcatcagatttccttacaccattaccaataattgttgatcaagttattcaagcaagtccaattgatgtacgtaaaaatttatataaaaatattgtcttaagtggaggttcaacaatgtttaaagattttggtagaagattacaaagagatttgaaaacaattgttaatgaaagagttgaagcaagtgaaagattaagtggtagtaaatcaagtggtgttcaagttcaagttatatcacataaaagacaaagaaatgcagtttggtttggtggttcattaatggctcaaacttctgaatttaaaagttattgtcatacaaagagagattatgatgaatatggtccaaatattgttagaaatttctctttatttagtgtaccataaataattagattaattagattattatcatttcttatttatttatttacaatttgtctttatatcattatatttatatccattaaagttctattatcatatattatctactagtatctactattatttatcatcatctattaagtgtaatgattattttttattaaattatataggaaaaatacaagaatacatacatgtaaatgaaatacttttaattatttattattagtttttctactttcaactttagcttcttgaccttgttctctccacatcataaatggaacagcatttgatgcaaatattttaggaattggaactgatgcaatcataccagttaatgcagctaatgcaggtttttgttcatatttacttgcaacccattgttgttgttccatttcattatcaattgaccaaggttttgaattacttgaaggtgtatacatctttaattatattactaattactattaaactacgcaaagagagttgttgtataggaattgtaagaaagaaacaagtggtagttaaagtaaaatcaaaataaatttgtaaacggggatagttattatttatatagtgattaattctaaatttatactatactatactattttaaatcttttcagtaagttcaggtacaatttcaaatatatcaccaactaaaccaatatcagcatttttgaaaattggtgcctcttcatccttattaattgcaacaattattttactatctttcataccagctaaatgttgaattgcaccactaataccaattgcaaaataaatttcaggtgcaataattttaccagtttgtccaacttgtaatgaattatcacaaaatccttcatcaactgcaactcttgatgcaccaattgctgcatgtaatttatctgctaatggatttaataatttttcaaatgtttccttatcctttaatgcacgacctccactaataacaattttacttgttgataaatcaggtttatcagatttagttaaattttcactaatccatttagttttacaatcattttcaatatattcaagattaataatttcaccattatttgatgattcatttaaattaacagttacttgggaatgatgatgaacgtactgatgtcataacaattggttcatttgatttaactgttaaaattgcattacctgcatatgttgatctaacaaatgtattagaatcaataactttagtaatttcacttaatggttgaatatccataattgctgcaactcttggtaaaatatttttaccaactgcacttgcaggtaaaataaatgatgaaatttcaaattttgaatcttttaaaatatttgtaattaatggtgtaacttgttcaggtaaataatgttcatacctttcatcattttgaactaatgttttactaataccttcaattttagaaacatttgaagctgcatcagttgcatttgatccaactaataatgcaattattggctttttaattaaatttgctgcattaagtgtacttaatgatgcaggggttaaatttgtaccattggtttctagaaatgccaagtgtatgtttgaatctatatgaagatctaactatttgacgtgatgataataatgcaaacatccttgttctataaaagtatcagtctccacatatattaaaatgaatcatccaatgactaacctgtaactttgactcttgaaaaattcaaaattaaattatcctctattacgtaatatcccacactttaatatctccgataccagtagttatatggattatagtagatcattacacattaaatattaaatatttcgttgtcttttaaacattgaaccgtattcaggaatcaggtacattaagtaaatccatatcaactgtagctaatgcctcttgaacgtcaacttctgatggtacaactaatccatcaatatttgttggatttgtgaaaacactaacatcaggtgtcataccagttggttgtaaaattgatggtgttaaaagtgtttcattatttgtatttataattggtatagtatttaatgaattaatatcattaggatttgacgcacgtttacgtgtaattgtattatatggtatattattattattcgtagtagtagtattgttattttgctgttgcacttgttgcacttgttgtggaggtaaaacttgtggatgaccttgagcttgtacttgaacttgtacttgtccatttccatgaccatgcccatgtccatgtccttgtacatgtccttgcataggttccgctgatggaggatcaataataactggatttatattatgctttttcaatatcatataaagatcatcctttgtaaatggtttacctaaaatatcagtcattccatgacttgaataatgagctaaatctttcctatgataagaacctgtcattgcaataattggtgtatctctatcaaatgatcttataactgaagttgcagttgcaccatccagatttggcataactatatccattaaaataaaatcaaatttaacttgttcaactgctgaaattgcacttaatccatcattaacaacaacaactgtacatccatatttaataagaaatttcctacaaagttgaatacaaatatcatcatcttcaactaataaaatatgaataattgaaccttttggacgatttctaattctttcctgttctgataatgcattatttggtgatgttaatttaatatcatttgaatcaaatggttctgatttaatatgtaaatgggtatttggatcattgttaatattattattatcattaatattttggttactgttatgactttcaatctggttatttattggacttacggatatacttttattggtattaggaattgattgattatgattatttccattgatattagagtgggcattattattattattatgattattattgttgttgtttgttattgttaatattattatcattattaatagcaggattggtaggattactatttggattagtattgatattcgtattttgattattaactaatttattactatccatcaaatctaaatgaggaaattcaatttcagaactaactctaccacctaattgtaaaattgaattatataaacattcaattgatcttgataatgacatattaatatcttttgaagttaataaattaacaactaaagtattatatttttgatttaatttcattgaatctgattttaaattagttatattatttgttaaatttgaattttccttttctaaataattaatcctatcctctaatcttctaattgaattaagatgattacaattattattatttgaattattatcatttgaatctttctttaccggtattttcctcttaatattttcaattgaagatttatcaaatctattaaaatcaggatgcttaaattcccaaacattctctaattgatatttttgttttgcctcattagatattttaactttatggaaaccatatttatttaactgtcgtacaaaacttgaaaaattactatgtttaaaataacatggtaaaacttgctttgtaaattcatttgtatccataattaaaaatgaatcaccattatctgaccaattaacaatattatcaaatctattctcttctaacattgtaaataagtttcttaacaaaatctgaaccttgactgggtactgattgtgtatcgataagttcccttttccttatccttcttccttaatcatagtcttattgatagtattagtatcattaatattattactattactctctggatcattactactctcaatattatctacaaccatggtgtttatcctaccattcaaaccaaacagggcttataattagagactcacccaaattcaagagacatattaatatcattacactgtatacaaaactaaaattaaaaaaattacaaaattcgctaactttaagaaaagctcatcttttcgtcttcaccttcacctggaactccaccaggccttgcaccatgttgttgtacactttggcacgggcaggtttcggggatcgttccttcttgttgaatgtagttatcaggattcttgaataagactgtattgtttgtatttgtagtagttgtatgagaagtacctgtcatttgttggtgtcgttggagttgttggtatgtatgtgggctgagccgtcgcgtcattggagttggtattggtattactattggatgatatggaatgagtggatatagtagatgtacgtgatgttcttggggaatagtcaatggatgattgacgtgtatgtgtaatttcgttgttggtattggtagtggtattaataatattattattattgataataatactattattatttggagatgatggaggtattttccaaacagatatttgaggtaccgcttgtattgaattcctttggtaatgggtatctatagaatatgaacgaggggtattatttgtacttggtgaattagttgataacattccaaaacgatgggttgttgccgttactggtgttgttggtgattcaactttattttctttactatttttcttatttggggtatcagttgggtatgtaaatggtacaattttaattgtatcatttgattggaaatttgttataattgattctaatgtctcagatgaactaaatgaacttatagaatttgatgcatgataatatgaaaatgttgaatttttagaattcttggagtttttcgatgatttggaggatttagaatttttcgatgtcttggaatatattgatgtattagatgatgaaatatttggtacactttgacgtttttcaatttttttacgattggtagttggagtgattggtgatgatattattgcatgtggtgaactatgatgatgtgaaaatgatgaagaagattttaatgatggtgtagttgatgatattggtgaatttctagagactgccttagcagctgctcttgcattttcataatgttttttagggaatggtttattaagtgaattagcggatgcaacagctgctgctctctgtgccattgacttattaggttgtgttggaaggaatagttatagttgaagatctatgtttctttctcattgttgaattggtattagttggagtattcggctttaccgggtgattttgtttcttaactgttggattgaacaaattatcaatttcatttaataattgatcatcaatgatatcattattattattaagagtaattgtatcattagtatctgattcagaatccaatatcaagaactgagagacatcaaaatcatcattgatgtccagcatcgttgtaaatagagcaattgcaatagaaaatagtggattaagaaggtagaataatagataaggcataattaatataattagaagaaaatgaggatttttcactggggaaatttttcagccgttactgggcaagccgatgggtcgattggtgggggaggttattctttcctctcttctcttctctctttccattcaatccattagacattactaagctctgtgttatagaaagacaggcactcaatagacgataaatatgttcagttcattaagatctaatattattcgttcaagtttaagaaccaatactataaatactcgttttaatgctattcgtttcataagtgcagaaactcgtgcagcaattgatgaagcagttaaatctgcacctgttgttcttttcatgaaaggtacaccagatgcacctgcatgtggattctcaagagcaactattcaattattaggtcaacaaggtgttgatccatcaaaatttgctgcttataatgttttagaagatccagaattacgtcaaggtgttaaagaatattctgaatggccaacaattcctcaattatatgttaatggtgaattcgttggtggttgtgatattataactaatatgagtcattcaggtgaattagctgaattattagatgatgctaagtgctcttgttgaagaataattcatgtattattattatttccttattattatttccttattattatttataaactatccaccccttgttatatatactatcctaaactaaactacattatacaatactatctctacggaataaaccacctttcttagcactggattcagcttttgaacatgcttctttaaagatccattcacccatcattaaccattctttaacccaccattgacccttttcacctgctaactgctttatctggtgccatagtacatcctgtagcttcatgaactcctgcaatgacaactgcaacaagtactgcctctactgctaaatgtgttaaattacctgctgagaatacacccattgttgtttgtatatcctaagaaaggcattcagggtaaaagcgtgttacatgaatttaaatacgatttttcatctaagaataagtatactttcttttacaatgcaaataacaccacagagaaccatacctattgagacatcattaccattatcatcaatacatacattctcataatgggttatattcattagcatcagctcctgatagagttttattattagataattcaagaggtaaaatagttaaaactataatgtcaaagaaatatggtgcatcaaatgcaattttcacattaagacaatcattatcaagttctaaatcaacattaccaacttcatgtattgtttcatcatcttcaattaataatgatttatcaatttcatcacatgctttaagattattagatatttcaactgattcatttcaaagatattttaatggtcataaaggtcaaataatttcattattaccttcaaataattcattatttggtatggatcttttctattcatcatcaattgatggaactgttaaatcttgggatagtagaataggtaatccacttaattcattatcaactaattgttcaatacctgtaattgaattagatacatcaggtacattacttgcattatacaataattttaaaaaaactatatcaattttaccattagaaacattccctaaatcaattatatcagaattctcaatccctaactttacatcaaaatgaaatagtggaaagtcttaaatggttatccaatggattacttataattaatgggaaatacacaaagctaatattaaatactttcaatggtacaattcacacattaaatttccaatcaaatatagaaataatttcagatgatttatttagatcaagttcaattgatgtttcacctaatgaagatatcgttttcctttcagataatggtataatatcatgggatatttcaacaatttcaatatcttcaacaatttctaaaaaaattgaaccaaaatttcatcaattattatcatcacgtataatatcaactaatccaatacaatcatcaataataacagcagataatgatataacatattcaataattgattattaatctattttaaaatttattcaacatcatatctaatttcagcattttcataaatccaatcacaccattcatttaatccacttttttcaaaagtgtttaaatcaccgacgacaaataattgttttttacttcttgtaattgaaacatttaatcttctttcatcactaacaaatccaatttcactattaccaaaattttcattacttgtacgaactaatgataataatataatttccttttcacgaccttgaaatccatcaactgtactaatttcaacattaaatttttcatcaattataccatcttcttcaattataccattccataataattctcttaatcttgcaacttgggcattatatggtgcaataactccaatatcatcgattgaaatacctaatttaataagttttttaatatgtttttgaattatataacattcaccaatattatattttgagccattttcatcctcaatttcatcatacataccctgtgtatcataccaaataatttgttcaattaaatcatcatccaaattctttgttgagttcaattaactcaattaatttaccatttgcaacacttgaatgtgcaattaattcattattataccatttataacttgggaatttcattatcttttcacacattctatattgaacatttaagaattttttaaatggtaaattattttcatataatttatttaatctatcaaataatgacattgaaagtattttaaaaaatttattattttcattcatatgtaaagttggtggtaattgtttatgatcacctgcaataattaattttttaggtgaatgatttataattggtatccaacaagaaggttccattgcttgtgaaacttcatcaattattaaaacatcaataaaattttggaaattttcaattccattaccataattatttgaaactaattcccatgaacctgatccatgtaatgttgaaattataatttttgcattcttaattgtatcattaacaattcttgaatttcttaattttaattctttattaagtaatttaatttcattccaaattgatttcctatttgaccattctttactaattcttggtttacgtacctctttctctaatttaataatttcattttctaaatctttaaattctttacccttattctcattaattatataatctaatgaataattacgtaaatgattcataatacgtacaggatgaccaattctaattaattcattagaggaacgtttcctttttgactttttttcataatgggataatttttccaatattgtatcagctgcaatatttgaagcagcagttattaatattctaccattaattctatttttcaattgtaaaattaattcaattaatgttgaagttttacctgtaccaggtggaccatgaataatacaaatttcattaccaattgcaaattcaattgcatctttctgtgaatcattaagaaattcattattccaagaatcaattgatgtttttgactttggaatgtactttctttcacctgttaaaatatcagttattgaatttggtttaaattcatttaattttcttaatgttgattccattcgtttataagttgattcattagatattttaacaatccaaaattttgaattattcgaccaaatttcatcacaatcttttgatatgacaatattaatcttttcatttgttgattttgatacaacaccatcaatattgaaaatatcattatcttattattatctttatctttttcagatttattcatttcctgtaatttaacaatatcaccagttttaaaatctgtaaaaggattaccattattattcttaacagcactatgaataacaagttcgataattgatttacctgtaaaacttttcctaatattattaattgataaatttaaaacagcttgaccattacgagcaagtaattttggtgatgatgaagttaataattgatgagttgattcataatcaattaatttttcattctctaatgcatttaagagtgatattgataaatcttttgacatagtatagtcaaagggataaaagaaaagaaatttatagaggatgataaaaatttcatgaaataaatataagttctttaagaaaaaaggttataaatatgggataaataaatatggattatagattataaataaataattttagagtaatattatatgatagtaataggagaacagactctacatgataactaaatcaccgaatttttccttataaccaggaacttcgaatctaccctttgaaaccatatcttgaactttatcttcaacatcaggtctagccttaacaacatcatcaacagttaattgatcaaatggtcttgcagattcaatattatctaaagttttctctaattcagttaattcctttaatactaaagattcagtttctttagcattttcaattgctttaacttcaaatgaattaataatatttaattgttttagataaatcaatagttgaaggtttaaaagatgaaatatcagatttaatagttgaaacaattttatcatttttcaaagatgaataattattaaattcaattgaagttgattgagattttaaatcaaataaaactttctttgcttcatcatttctctttttgaaggaagataaagaagtagcagtttgaccagtaagacctaattgaggaatgattctagcccaatcgatcttagtagtagcagatttagcaacagcggacatttgttcttgattaaagaaaggtattttagaatatactatactatactatagtatactaatattcatgttagtataatcctcgaatttgatatattatagtgagagttgtgaagaccaattaaatttcaaagattttttttctattattaagtggtgtacagatttaattttatcttaatttattatagacgcgtctgttattattatagatcacgtgattgtttacgtaatatatcacgtgataattgattatgtaatcatttgtgatcacgtgatgtttgtttaaatattaatatattatactagtttccgcgtgacgaacctaatcgactcttttgtcatttcccctgaaggggaaactgacgcttaaagcgttgggtttggtaatttcaatttccctacgggaaattttgacccctacttactactacatattttatttttgataacaagctaataataacaaatgtcactacaatagtaaacctttgagtatgtaaaccgtaaagaatccattaattctgtagacactgaaataaatttgtaacatgaaaaaatgggtacatgaattttagatacgcgtttacgtaatcaactatcactataactatttgaaaagcgttaaaatcagcgttaatttaatgtactacactttccaatctcttttaaatcggacgtgaatagtaccaaacgaaagagaaacagtttttctgcaaaatatcaaatatcgttttttagttaggctttcaaaaaaaagttatcactattttaatattttttgccaaaaaaaaagagcaaaatttgcacacatttaatgataacatttttttgaaaaaacatttcgaatcatactttacatcagtttataatttaaaaacacatctacaaaatgagtttctgaacattaaaagttgttaacaaaaagtaacaaaaaagctagcttgaaaaatttctaaaaaaaacgttcaaaaatcactgaaaaatggatatttaatgaactttacccttacttgaaaaactaaaaatggtgtcattgggaagagagtaatacggcctacacacagaatttttcaaaagtatacctccaggggtatttgaaggagccagagtcagttgaaagtggtcaaaaatggacaaaaactcaaaaaactaaaaattcctttcaaggacggaggaaagctccaatgatcccaagtaaattactaaataaacttcaaacaattccaaatccgatgacctattgagcgtgtttcaatgatccagaaagaaaaagatatgaacgtttgaaaaatcgaaaaaatcaacttcaaagggctataactcgataactagaggtcagataagaaaaagggctacatttgttagtgcggaaagtcccaaagatgttattcaggaaataaaaaaaaatcgcggtttttagcgtctaaaatatgtagtactaagtaggattacgtaatgtaaaatttaaaaattaaaaatgactctacttactacttactacatgaagaaaaccttatattattataatagtaatcattcgctaatagtgaaggaataataatctactgatactgaacatttaataattataaggttaaaatattatataaatatagggatacaactttcttttaatatcaattactaatgacatcattatcaattaattctccctctccttcatcttcttttaataattatcaacatcatcatgaatttaatactaatgataatataattaaagatcattctttgattttccaaaatagtcaattacataattggtatttaaataatagtgtactatgtatggtaacttcatcaaagaggaaattattattttgtggtacacaaaattcaaatataattgtaattgatttacaaactttccaaattaaattaaaaattcaaactcatgttggttcagttttatgtctttatttatctgattgtgaaaatactttatttagtgccggttcagattcacttgttaaaatttggaaaattaatgattttattgaaaaaattgataacaatagtcaaaataataacgaaacactacaattattaccaacttatacaatttattcattattagatattggtgatatattctcaattacttggattgctgatttaaagactatctttattggttctcaaaatgcttctctttcattcgttaaattagatttaattaataataacaattcttcaattaatgatcattataaattaatgccatcaaatagattcgatagatttttcgattcaaataatgataaattgcccatacacgcagatactgatataactacaactacgagagtaattcaaatacctaatgataatatcatatcatatgctcataatggttatgtttatgcaattgattttatgaaaattgatgaccctctaacttttaatattggtaataatatttcagataattatgaaaatataatattctcagctggtggtgatggtaaaattaatatttggggttataataataatttaaataatttaattttattaaattcactgtctaatgatcaaattgatacaattttctcaattacaattcataaaccttcaatgacaatttattcaggttcttcaaatggtaatatagcaatttgggatttaacaactttccaattattgaaaattttccaaattaatgataaaaatgatatttatactttaacaatctcacctaaaattaataattattcaaatgaatggttatttattggaacagaatttggtataacaaagaaacttatttcaaatataattaataaagatataaatgatttaattattgttacaaaaaatgctccttgtttaacattaaatagtttccaaatgaataataaaacttatttagttagtggaggttcagataattcattatcattatggtcattaaaatcaatgaatgatatatgtgatgaagatgatgattcaaagtgaagaaatcgataatgaagaaaaattctttaaaggattagagaaaacacaattacatgattatataactaataatgaaaatttccttaaaattttaaaagaattaatttcatttagatcagtttctaaacaaccagatatttatatgaatgaatgtaggaaatgtgcaaattatttaatgttattattgaaaaattttggtgcttataaaactgaattattaccatgttgataatggtaatccaattgtttattcaacttttaaggcaaataaattgaaaaatgatgatggaactaaaccaacaaatattttatggtatggacattatgatgttatacctgcatcaagtaaaaattggaatacaaatccatttaaaatgacacctaaagatggttatttatatgcaagaggtgtaactgataataaaggaccattattagtttcaatatttgcaattgcagaattatattcaagaggagaattagagagtaatataacatttttaattgaaggtgaagaagagagtggtagttgggggtttcaaaatgttataattaataataagattgatattttaaaagattttaataatattgattggatattattaagtaatagttattggttagatgataatataccatcattaaattatggattaagaggtaaaattgaatttgaaattaaagtttggagtgataaacctgatagacatagtggtgtagatggaggtgtattcattgaaccaagtatggaattagttaaattattaagtttattagttaaagatgataaaatattaataccaggatttgaagaaatttatgataaaaatagaaatattaatgaaattaatgattgggagaaattaatttttgaagaaattagtgaaaggattgaaaattccaatataaatgaattaaaacgtaaatggaatttgccaagtttaacattacataaaataaatatgtcaggtactgaaaataatacattaatttcacaatttgctgaagcaaaattaagtattagaattataccaggacaagaaattgaaaatgttaaaaatgatataataaattttattaataaagaatttaataaatttcaaagtaaaaattatattgaaattaaaataattgatgaagctgaaccatggttaggtgatattaataatattggatttcaaacattaaaggaatgtttaaatgatgaatgggggattaaaccaattttcattaaagaaggtggtagtataccatcaattagatttttagaaaaattatttaaatgttgtgcaattcatgtaccaacgggacaatcaagtgataatgcacatttaaataatgaaaggattagaattgttaatttacttaaatcaaaggaaattattaaaaaggctgttaatagattaccaaagaatgaattagtttattgactttttcatttctttttttttttttttcataattttgtttaacaattatacattatatataatataagacaaatgaattattgataattaaattagtaaaaaaaaaatatattgaacaaaatttgaagtaaaatattatttttctctttaaatggtgatttttatttttgtgtatatataaattattatacataaatctctatattaatgtggataattgatatattgatagacatcataattgactaagtaattaattaatttatttctttctgaaagcacaaccttcagataatttacatttaccaccagttggagtacataaaatttcagtacaattttcacaagagacagcagtttgagaatgtgagaaaagagttgtaatttgtaaacaacctggacatttaacatccataaagaaagatcttggaccttgaactaaagtctttaatttatgtttttgagcttcagaggttgcacttgggtgtaataaatcttgaactaaaaccattttggatgtgatatatgaagatagacctttgagttaaagaaaatatgtaagtaaaatagaagatatgataatagaatttaaaattcaaataatgatcaagattgaaatgaaaatcaaaatgaaaatgaaaatgtaaatgaataacccttaataggtaaattgaatataatactggtataatagtaagaaatccactataataaataatactaacagtaagtaaatttttcactttttttctcctcattgaaatttttttttcattattgggagggtgagtattttcttattatgggggggatttctcttctttttggtgcgtctgtttcctctttgggaagggtgtgctcttttgggaagggtggtgtgcccttgtgtgttgcacgtgatgccaaaccctctgatatttctcggagttgcccttttttttaaattatttattattattgtaattactcggagtaccgatattaaactatattaatctctgtgggctcagtttatttcttaatgtaaacaatctcttattataatgaactctatacgtagttatagtactgttaatgatgataatgataatggtaatgatagtgatgaagagacatcctatcgtccttcaaatttatcttctaatgtatcttcacctcattccccccattcatctcgtaatttatcttctacttcttcctcaatcactaatcatccctatttatcattccctcaaattatcataattggtgtaattttaactataatacaacaatattctctaaattataaattcataacattcccattcatatccattataatcatttcattatcttattttactataaagtataataataataaattaaatttttcaattaattattataaactgaaatttgccttaattatttataattttaaaaaattggcaaataatggtcctcaattagatatttggtcaattataatgattatcctattattaacttggttattaactatttggaaattcggtattagttttattctttggtgtttcgtattatgggtttataatttaaatgataatattgaagaaatctcaaatgaaaatatcactgattcacctccaattattacatctaatgaacaattaaatccttcttattatatcatatattagaacgtaaaatacttgttttggaaaaacatataaataaattagaaaatgataaattacaacaaaatatattaatttacacacttaaacatacattaaatgaaaaaattcaaaatttagagaaacattcaaaacaaagagatcaaacaactcaatcaaatttaattcaattaactaatatcttacaatcttttcgttcaaggaaaacttcaagattagaaatttttaaaatgtatttgaaaagaatttcttatattaatattacctaattgggtaatcgggatattgaaatttcttaaaagggaaatgttgatgatttttaatgttaaaaaaaaattataattaactgctttttatatttttctttattttcttagggataatggcaaataaaagccgtccgaagaagacaagggggatattttacaaaaaatacgtctatggtgtaacagaggatgtttatgaagattcaaatggagatttatggattaaaggagatgataatgttgatcatatagatgataatagtataaaaaatataaaacctaacaaggataattccattgataaaactactggtttacgtttaccactggaaattataatagaaatacttaaattaacttcaaatccttattgtacaaatcatttagtactttgtcgagccatttattggatgttccttaaaaatatttatgaatatcctgaattaaaatcaaaaaatttagaatcttttttagatgtcatcagtggtgatgatgcagcaatggttaaagaaatagatgatgatttaaatataaataaagataagaaaaaagttaattctaaattagcattaaagagaaaatttcaattaatggtaaaatgtttagatttatcatcagttgttcaaaatggtaaaaatagttatatgagtaaattgttaagaaggacaagtaattcattagaaatatttatttcattcacaatcagcatttggtgctgctccattagttagtttaagagcttgtaatgaattgaaaatattagatttaagattagtttctgaaagtgttaatttagttgaattatttaaaagtattgaaagtttaccacaattagaacaattatgtttcccaagaagttcacttatttgtgatgaatatgaatttaaatggcctgaaaaattatggtatttaagattacaaggtggtataactgattcatttgcaattaatgttagattacctcaaacaattacaacattagaatttgctcattgccccaatttaacagatgaaggtttaaattatatattaagtaatattgggattaatcttaatagattatcaattcaatatccaatgcctaaaattggtgaaaagggagctgataaatcattttatctttgtccaaatttaaaatattttttcattgatattggatatatttcatgggaattattaaatgaagaaaatttagtctttttagaagaatttgatagaccattgaaaagtattataattgaaagtacaggatatatgggtatgtgtgaaaaattaacaccaaatgatataacagttgcagttgatgaaggtagattaccatgtcttgaaaaattaggattaagtgcaatgttaggttgggattttaaaagtgatgatatggaagatatggttagtgaattatttcatcatgatattcaagttttcaaaatataaaaatagtaattgtaataagtaatactaatataaaaaaacactatataatatacctgtttataaagatttattcataaacttctttctaccgaatgctaaccaaaatttacttgggacattattattagattgataaagtctaccaattaatctcgatgataattcttgtctaaattgtgataaatattgtctaaggaaaactgaatcatttctattatttggaggtaaataaagtgaatttaatggaaaacctatatcaccaggaattgcaaaatcatctaatgataaattagttaaaattttaattgcttcattcttatttgtattataattaattgaatttaaacattgtgataaaaataaaattccataaattaaagttctatctgaagcaccctttatttcaaaatttttgaaaaatgtatttgctctaaataaatcaattatttcatcaattatatcatatgattccatacaaggtaatgctggacctttaaatgttgtctttaatggtaaaattgccatattaccaataatacgtgcatttgtattcctcttcagcgagaaatgttgaatgataagcctatgaaaatggtaatagttagtattcattgttcattatataagtaattgatcaagttacggagggtgatacatactggcatgtgggtatattgtagattgtcttaataaaagaagtaattgtatataatcaatcaatcccacaatattaaacataatcagtaacaattactcgttaagtcgctcaattaaattcctgatactgcctctcttatttccattaagtctgtttcatcattttaatactttaagttattgattatttatacttataattagaattgtaatcttcacttactatatcaacgaagatgtcacagcaacatcaacatagtaataaaggacatgaatcattgcgtacgcagttttctcagtttcctgctttacaaactgctttaacaccagctgatataccttcattacccccacctcgacttaaatctccaattaaggaaaataatgatataagagttcaacatacttatcaagttagaagtactactgatcaaagagatgtaagtaataataatagtcaaagttatggtcaaaatattagtcaaaactataataataataataataataccaatatgaacaatatgaataagtaataatgtacaaatgcaaatgcaaaatcagtatcaaactcagacacagtcacctcatcgtccatcaacaagttcaaaatccacctctacaacaagttcaaccacattacctacaacaacaacaacaacaacaacaatattttgataatcgtcgtaattataatgaacctaatacacaatttcaacaacgacctcaaccaaattatcctattcaaagtcaaaagtctatgaatcaataccctaatcaacaaatacctccacctttaccaagggcaccgataattcaatcaattccaccaattccaagatctagagatgaaaatttacctagaacccctgattcttataatccattatatagaaataataataatcaaagaccaaatgttaaacaacgttcaggttcagaaatgattaaacgtgataatttaagagttgatacttcaagtaatagatctgtctcatatggttcaaatagtttaggtatttcatcatctccatcatctgcttcatcatcatctacaatggtaaatccagtttttacaagatcaaaatcaatcaccacccttcaacagctaataaaccttcatcaactaaaaaatctccaattgttagacaatctcttaatttccttaaaaatgcaagaaatattactttatcaaatgataataataataataaccaatatcaatatcaaaatatgtatcagaatcaataccaatatcaaaatcaaaatcaatttccaccagattctccattaactccaggtcatagttcatcaagagaaatggaaaaatatcatcaaccaattaaacaaactacttcaagtggtagagttatacctcaaaaaattgattattcaaatcaatttaagtaatccatcaattgattcacctaaaaaatcaagatctttaagtactttaacaagacgtgttacatcatcaacttcattacgttcaaataatgataaaaatagatttatttcaactacttcattatcaagtactgtaatacaatcatcaccttcattaaagaaaaaatatatttatcctgcattattatctgaagttgccgatgcttttcttcatgaaattaaattaacttgtcattttaaatatggtatcgaatatagaaattcattttcaggttctgaagcaattgatgttatttgtaaaataactaagattcgtgatagaaatttagcaattatattaggtagaagtttagattctcaaaaattatttcatgatgttacctatgaacatagattgagagataataaattagaaatttatttaattaatgatgttttcttttataataatcaaaatgaagaatttaaacgtcaaaattcaattacaagtaatttaacaattatgggtactaatactaataataatagtgaagcacaattacctacattatctaatccaaatggtacaaataataattcgattaatattataagtggtgtttttacttcattaactgaatgttattcacctacttgttcaagggataaagtttgttatagtgtttcatgtccaagaagatttgaacaaaaaatgagatcagaaatgcaaagttcttcaagtttaattagatcagattctcatatttcattaaatcaagaagatcaaaaacagtattggcaattaacagtacctaaaagtttacttgaaaatctagataaaaatgaaattaaaagacaagaatgtatttttgaaactattaattctgaaaaaacctttattaaagatttagaatatattagagaattttggatgagaccattaagtgaaactaaaattatcaaagataaggaaagagatcaatttattagaaatgttttccataatattaatgaaatttgggaaattaatcataaatttgctgaagctttagttagacaacaacaaaaatctccaattgttgattcaattgctgacattttccttgattttatcccacaattcacaccattcataacatatggtgcaggccaggttattggtaaatatgaatttgatagacaaagaagacataatcctttattaagaagatttattgaagatacagctaaaagagaagaatctaagagattagatttatcatcatttttatcaaaacctacaactagacctgcaagatatccacttttattgaaaagtattagagatcatactgatgagaactctcctgattataaaaaattaactcaagcaattgaattgttagagaaaatgttaacaaagattaattttgaaactggtaaacaatctgataagatgaatttgttccaaataaaacaaaaattattatttaaacctggtgaattagttgatttaaaattaagtgctgataatagaaaagttatttatcaatgtgttttgaaaaagaaagggtatcaagaaaaggaaaagcaaggtgaaattcatgtttatttatttgatcattgtattctattcattaaacttggttatttaaacaaaagagaagtttataaagtttatcagcgtccaatacctttaccattattatactattcacttacagaatatcctccaactataaaatcaatcagaagagcagctatgacaacaggttcatcaccttctctgttaggtaatagtctatcaaattcaactacttctctgattccattaaattcaacagttgctaaatctcctttatcatttaaatatttaggtgttcatggttatgaattaacattatatggtacacctgccactcaaaaaatattagcaaataaaatcgaagctcaaacaaagaaagttttggcagataatgatgtttatacattgactccattatcatcaaatttctttgattcacaaaataaaattaactgtgttataccctttgatggtggtaggaaattattatatggtacagattctggaatttatataagtgatagaacaataagtgatagtactggtaatggatctattattaaagtgattaataaatttaatattatacaaattgaaataattcaagaatatcaacttttggttgtattatgtgataagaaattattatattggtcaactagtgttttagccggtggtgatcctattaaaaatggtaagttaggaaaagagttaatgaatcatgtatcatttttcaaaattggtatctgtgatggtagaatgctattatgtgcagctaaatctacatctaatattgttcgtatatttgaaccagttaatccaattcaacagaaaaagcaaaagaagaagtttgaaaatgatatacaagatatcaattttggatctgaaccagtttccattaacttccttaaaactaaattatgtgtcggttgtgcaaatggtttccaaattgtttccttagttaataatacaatggaagaattattagatcctgcggatacatcgttagaatttgcaacaagtaaggaaggattgaaaccattgagtattgatagaatcaatagtgatttcttactttcatattctaatttttcatttttcattaatcataatggttggagagttagacctaaatggatcattgaatgggaaggtgtcccacattcatttgctctttggtacccatatttattagcatttgatactaatttcattgaaattcgtagtgttcaaaatgcagaattattaagggttattgttggagaaaatattaggtttttacatgcttcatcacaggaaatcctttatgtatatgaaaatgaaagaggttatgatgttgttgcatcacttgatttctgggataaaagtattaaaaataatagaagtcgtggtaatactgtcaatggacatagtaagcaaatttctgttgacatataggattggtttttatatttattttgttgttataccttactgtttactgtatactgtatttataaaaatttaatgataataatagtagtaagaattggaatagaacaaaaggttaagttgatgacgtaaaaattttgaatattgagacctccctctcttcaatcttgaatttccaatcttcactctgttgatcgatgtattgtcagcacagtatttcttcccttttaacatagaaacaacggtttctttgacaccagaaagatgaacattgagctaagacatgggtttctcaatgactcccattttttagatgatcttcaactacattattattcacactttgatttgaaaagaaatacaacatctgcaaatccatcagaagatgatgatacttataaaatatctgattggaagaacacgggtaacaagaagaaaaccacaatggcagcattagtaatgtgtctgaatttaggtatcccaccaccagatgttataaaaccacaagaatatccttatttagaatcttttataaatccatcaacctatccagattcaaaaatggcattacaagccattggtaaatcattacaatcaaattacgaatctatatcatctagggcgaaatataagcaatcattagatccatcagttgaagatttgaaaagattgtgtacctctttgaggagaaatgctaaagatgaacgtatattgtttcattataatggacatggtgttccacaacctacacaatcaggtgaaatttgggttttcaatagaggttatactcaatatatacctgttagtttatatgatttacaaaattggcttggtgctccttatattatggttattgatgcaaatgccgctggtcgtgttattgaaaataataaaagatttattcaaaagagaattgatgatgaagcaaataatcataatgatatggctgcaccttcacctgtcagtgcttacattgaaagtatacaacttggtgcttgccaaagtaatgaaattttaccactgaatccagatttaccagcagatttatttacctgttgtttaactcgtccaattgaaatgagtattaaatggttcattttgtattctccactaagagaaaaggggatattatgaggcattgaagaataaagatggtggaattgatatacccggtaaattaacagatagaagaactccattgggagaattaaattggatatttattgctgtcactgatacaattgcgtggacaacattatctagaccattatttaaaagacttttcagacaagatttagtagttgctgcattgtttagaaatttcctattagctaaaaagatcatgccagaagttggatgtcatcctatttctgatccaccctttaccagatataaataaacacttcaatgtgggattcttgggaacttgccattgatcaaattttaagtcaacttctcgaaaaaaaggcatctgaacctgaagttggagatttatcagatataccccaattgcaagtcgtaaatacatcaaatgatggtgataaaaaagtagccaatggcaactcgaataacataggtaacggaactacaaatgatagaaatggatccttacctaacggacaaaatccatggaattatcaacactgtacatttttttcaacagcaccttactgcatttgaggtatggttacaatatggttcagcaattaaagaaccacctcaacaactaccaattgttttacaagttttattatctcaagcacatagactcagagcattgcatttattatcaaactttttagatcatggtccatgggcggtatatttagcattaagtgtgggtatgttcccatatattcaaaaactactccagagtccttcgttagatttaaaacctatccttgttttcatttggagtagaattatgtcagttgactataaaaatacacagcaagaattagtcaaggatagaggatataattactttcattggtatgttaaccctccaaccacgtccatctcaacctcatcttcatggtaatccattagttattgaaagttctgctgtaaataatgatgtcacatttgctgatcaaaaggcaatgagtgcttttgttttaacaatgtttgttagagatcatgaacaaggacgaaagcttgttttttctattgacttattaagatgttgtattggttatatagaatcatcagaaagtccattattaagacaatggagtgcattattaattagtgaaatggttaaagaacacttggaggcagtagtaataattatgagaagtggatcaaccgataaacttctagtattgttaaatgatccaattccagaaattcgtgcatctttggtttttgcattcagaaactttattttgttgacaagtgaagttgaaggtcttgaaaataactatggtattagtgatgaactcaataagcaagatttgaaaattgttacagagatggtttcactgtgtaatgatggttctgcattgattaagaagagaagttctatgcttaatgagtagatttgttgttaaatatttaccattttttcttatcagtgcgtttaatcaattggaagaggagattacattacttgataatccttcaattatcgatgaagtcagaagaagatcaccagcttatggttcaattttttcaacagtatggaaaattttattagtcctgagtgaagatccacatgatgaagttcagaattattctcaacaaattgttgattatattatgctaaaattaagagaatccaaatttagtgatgttgtttctacaatggaaagttatttattaaaaaataaagctagtgaattaagctcatgactctatggatcaaacagtgttaagtaaaattggaactaactccgaaataaatttgaagaatgttcacaataaaaatgcaaaaagagttcaatctgctaattttgattccgagactacatggtgaatcggactgaattggcacctaaatcttcttcctcttcaatttaccatttttcattaagtaataaagtgtcatctttgagatcatggttaagtgcattcaacttgtatgatgaagatggaggcgataactccaaaactacagctttgacaaatttattatcgcaacaacctatatcagtttcatatggaacaaataccaaacctaccacttacagatttaagcctcgaaacagagagaatatatatcctgtattacccttttctagtggatttttagattacagtagtgaatatttccaagaatcacaattgggaccaaaggaagaagatgagccaggaagtaaagaatacatgagaagaatttggagaagaaatagaaatgaagctatcattgctgctactcaattacaaaaggaaatggcgttgactggtaactggaaaaatgttgtatcaaaacttaataatgttacccagccaaaattaataaaatttacccaatttgaaaaatggatggcaactactgatgaaagagacaatatcacaacttttgactggagtaaaggaactgaattgagtaagttatcaaatggtaatccattaggaactaaaattactgatttaagatttttgaatgaagatagtgtgccattattaatgacaggttcaagtgatggtttagttagaatttacaagaatttcaacaatgaaaaagaatgtcaattattaacagcatggagagctttgactgatatcatacttacaccaagatctgttggtttattaagtgaatggcaacaaagtagaggaacattattggttactggtgatactaaagttattaaagtatgggatgcaccaagggagaaaaatatacttgatgttccaatcagatcaacatcacagatattaacaatgacatctgatcaagttagtggtaatataataattggaggatttcaagatggttcaatgcgtatctatgatagaagacttgattcaaaagattcaatggttaaagtttatcaacctaaaaatcctgttaatagagcaccaataagaaatgtgcattatgcaaagaggtggattacgtgaacttattagtggtagttcaaatgggttagttcaactttgggatattcgtaatgatgatccaattctcaaatttaaaccattccaaaagacaatgatgacagcatttattcatgaacatgctcctattattgcatgtgccaataaggaagttgatatttacagtactatgggtaaaaagattgcatctattgaaaatggaggatttattaatacattgaatggttcaggttcgtagtaattcatcatttgttaatagtattgcattacatccgcactagaatgatgttagctactaattattctcaaagttcagagattacagtttatgaatgtcatgagaacagtttggatgatacattctattcaagagaggaattgattggtgattatagttgatctttaatgtaatattaatttgtgtaaatatatacgtagtagaaatgttagtagtatcaagataaaatacctggattatctaacatccgatctatgtcggagataacgggccaataaaagttaattatcacagctaacaattataaagagcagttcaacaaagagtgaatcatatagtaccttactgcatctacaacaatgtggatatgataccataagataactctcccagtgttcatcaagagtataccagtaaaagaacatcggtaagagtttccctaactgagtccggaggtaatctccaagaaaaagtgcaaatccccggtctctgaaaaatttcgaggtggcacatgtaaatttaaaatttttaggattttgactccaccaatttctactgtactagacacggtgttgcttttgaaattgagtaatatatttctaaatttaacaaaaactaattaaggaaaggtcaaataattgattctttggtatatacacatttatagattctttttttcttgtcaaaatattcataaaatataaaggtttagaccaaaaataaaaagttaatcaaattcaaaaaagatggctatgagttcggagattgcaggtgcaattgaagaagaaaaaaacgtatttgatcatgattttgactcaaagtatcaaaataatgaaaataatacaatgataacacaaaggaataaaagtacgggagacctaacactatctcagcgaatgttgagtgcatgtaccggatcattacttacatcgttagtcgtaacgccctttgatgttgtcagaattagattacaacaacaagagcttttataccctgttcagacatctgatgtaacatgttgcagaaaagtattttgggaattatcaactgacaaaatggttggatcaatgaaaggaaatttttgccagccaaatgcatgtttaaatgaaggtggtaaaatagaaggtacatttcaaggtttgaagaaaattgcaacagatgaaggagtacgaacactttatcgtggattaggtataacattgttaatggctataccctccaatgtggtttatttctctggttatgaatttttaagagactcatcccctttacgtgaacaattcccagttttgaaccctttactttgtggatctgttgcccgtattcttgccgcaactacagttgctccattagagttaatcaaaactagaattcaagctgttccgagtggatcaacaccaaaatcatcatcccaagtattcaaaatggttgttcaaaattccttagatgaattaaaatcaaagggtgtttcatcgatttttaaaggattgggattaactttatggagagatgttccatttagtgggatatattggtcaacatatgaatatgtcacacatatattgaaaacaaaatcactactagatgaacaaaccaatatattaagcgaagatgcagctttatttgttagatctttcataggtggttcaattgcaggtataacagcggctatatttacaaatccttttgatgttgggaaaacaagaatgcaagtttcctttgatgatagtaaaaacatgggcactctaagcacgaaaagtaaggaaaaggaaactattttcagatatatttcacaaatttataaaaatgaaggatttggtgcattatatgttggtttgataccacgttgtttgaaaattgctcctgcatgtgccattatgatatccagttatgaaatgactaagaagttttttaaagataagaaactacaagaataaagttgacaacatgattgtatcataactcctgtaaatatataaaattgatttttactaagctagaataaataatataaagaaaaaattataatcactatgactttcttcaattaactaattctttttttaatattacaaaaattcaatcattactaccaaaacttatactataatttacacataatgaaacttcattcgacgagagtttcacatttaacttatttttctttattctttatatttgccaaaagtgttttcaatatctatgttattgaagcatttttcgttgcgttgcaattacttttattatcattaactacttttagggtatgattttctgaagtattgatttgggcattctgctttttcttaccttttttcctcctaagatttggcggagcaagagttgcattaaaagcctcccctaatgtaaaagtaccattccttgtatcaattatttctgcagattcagtgttactatcatctgaatcatcttcagattcttcttcatcagtatccaattcagtttgtttagatgctcttaacattgcattatcaactgaaattcctgattttccagcttcaccactataaatttccctggatactttttccttatattctaactcatatttttgtgcaatatcaaagcaaggttttttcaaatattttgaatctgaaatgctaagttgttctcttaaaattgaatcgtgttgatctaactttctttcaaaacttctaagatccatagttgtgcttctactcaactcattgatgaaattagaatatttgtttaatacataaacataaccaaacatagcaggacgtaatgatgatctgacactttgctctaataaattttgtgctgatgataatgaagaagttgaaaacttaagtttgtcataaatactggaagtcatatttatatcagtacttttcttcttgaaaagatctaattctctcttagcttttatattttttatgacaaattgatctcttctattttcttgctttgagatggtttttaaacgaaatccaatatgctcaaatctatcagcgatcatttcattcatattatagtttaactgtaggtatttactaaattcaaaagaaagttttgaaacttcatcagattcaaatgtacttgcccattcacacatatttttgtttgtttcgtctaataatttgtttgctatttgcatttgtttagcaatttttctaaagcttgccttaagatttgcagcactaacctcatctggtttcatagcaccaaatttttccaacttaggtcttaaatttgaaagtaaaccattactttcgataatctttttttcttgtgtttcaattgctttgaaagtatttgtaaaacatggaattggagggctactctctcctgaatttgcctgatttaatgaggagctagtagccgaatactccgctgatgatggatcaaagtattcaaaagctgcaacttttgttggtgatgaactcattggtgttttaaatattattgataagagactaattaaataaaactaaagtcaactaaagaatcgaaatagaattagagatagcaaatagaattaaaaataaaaaagtcctaaaaaattttcggaaagaatcaaaagtacataataacaagataattggaaagtacttgtttacgttaaagatcaacttcagaaaaatgggaaacttcttttactttcctaaataggaagttatccaaaaaggggaattttccattttcatgaaatttttccaatttgccgttttttcatgttggcttcaatttacagtgcttaagtacaagttttcttcttcttgaaattagttattagtacctcaagttgtctgttagtggtagatatcaaatattcaaaagaatggcacattcctattttgaacaacagagtaattttaaagttgattatgcacctgccaatatcaaaaaatggagatcaactaggactggtttacaagtaaccctgattgatcaagcatctcctgttgttaacggttattttgctgttgcaactgaaattttgaatgatagtggttgtccacataccttagaacatttgatctttatgggttctaaaaaatatccttataaaggtttattagacattcttggtaatttagcattcagttcaactaatgcatggactgcaacagatcaaactgtttatactctttcaactgctggttgggatggttttaaaatgttattgcctgtctatctagatcatttattcaatccgactattactgatgaagcttgttatactgaagtttatcatgttgatggtgacggtaaggaaaagggtgttgtctactcagaaatgcaaggtattgaaaatcaatcgtggtttattcaaaatttagaagcacaaagaactttgtattctaaatctggttataaatcagaaactggtggtttgactaagaatttacgtacattagatgctgaaactataagaaagtaccatgctgataattatagacctgataatttatgtattattgttactggttctgttaatgaaaaggaactgttagaattaatggtagagtttgattctgaattacaagatttaccagaagttccaaatttaagaccattcgttgacactccaagagatttaccattgactgaaactataactagaactgtttccttccctgataaggatgaatcttctggacaagtcatgttaacttggataggtgctgactcttcagatactatcttagatcaagctattgatatccttggaaaatatttaacttcttcttcagtttctctcttcagtcaaaactttattgaaatcgatgatccatggacaacagactcctcattctacactgaaagctatgttttaagttcaatggccatcaatttttctaatgttcctactgaaagattatcagaattccctactaaagtattagaattgatgaaaactcatggtactaaagaaaacttggatcttgaaagacttagagatttggttgatcaaactatgtggaaatttgttcatagagctgaaaagagccctgaaactctttcgtatgtttcaatctttgaatttgaatatggtaaaacaaatggtgaagatttagagagatattgtaaaactttagatgaatttaaagaattgatgagttgggatatttctcaatgggttgatgtttttcaaaaatacttcgttgaaaatcattgtgctattgttattgctaaaccttcaaaagctctttatgaagaaacaaaagctactaatgccaagattttgaaagaaagaaaggaaaaattaggtgttgaaggtttgaaagctttagaggataaattaaaagctgcgcagaaatttaatgacagagaaattccagctgaaatacttgactctttccaaaaaccagatccttccagtattgaattcattaaaacagaatcaattgttgccggtcttaataaagatttaacaaacaaaccttctaaaagtgttgatttagtgaatgcagatgtaccagaagatttcccaatgtatgttcatattgaaaactatgaatcaaatttcacaagtattcagcttcttttttcaacttttgaacttgattcaaaacttcttccattacttagagtttttgaaactattacaaccttacctatagtcagtgaagacaataatttagttccatatgaagaagttgttaaacaaattaagagagatactattcagtgtaattttggaagttctttcaatggtagattcgaggaatttatgtctttgtcaatgactgttaaaaatgaaaattacataaaagctattgattggtatattaagttattgtttaaaacaaagttcaccaaggaaagagttctcgttgctttaaggaaactaattcaatccttacctgaacttaagagaagtggtagttacatgttgagataccttgctaataaacacatgtattcagaaagatcatccatcaaatcaagtgaaattattgatcatgaagaatatttacaaaaccttcttaatgaaattgaggcaggtgattttgaaactactgaaaagaatttggaagaaattagaaacaaattatttgatagttctaatatgagattagtcatttttggtgatataaataaacttgagaaaccattatcatcttgggagaaattcaactctgttttatctagtaaagcaaataaaatcactgaattaccttatcaagaattagctttatctgaacttggtagaaaaaaatctgaaaaatgtttcattcttacaacaccaggatctgattcaagttatatgaatttaatcacaaactctccgttaggtgaatataattctgatgatacctttaaaatcatgcttggcgctgaatatttacaatgtgttgaaggtccattctggcgtggtattagaggtgccggtttagcatatggtgcaaattgttataataaaacatcaatcggtgaattatgtttcagtatttacagaggggcagatgttgaaaaatgttattcagcagcaagagatattgttaaaggatttgcaagtggtgaagtagcgattgatgatagtttacgtcaaggtgcaatcagtagtatggttaacaaaattgcagagtcccaatctaattatccagaaaccgcaacagcacaattttatgatgatgttttagttaagagaggacctgattataatggaaaggttatgagaggtttatcaaaaattacagctgctgatttagttgaagttttcaataactattttgttccattatttgatcctaagacaagtgcatgttttatcagttgtaatccatccaaggcgggtgatattgaaaaattcttcaaggatttgatgtacgatgtttcagttgaaaatatctcagttgaagatgatggtgaaggtagtgacgatgaaggcagtgatgacgaagatgattcagaagatgattcagaagaatacacatctgatgaagaagaagaatcatctgatgaagagtaataatgtcattcttctgtatacattacgtagacaatatagataataaatttttatatgacagcttgttaaataaagttagttcattaaattgaatagtaagtaaataataagtctatatacgggataaatacataatctacaaccaaatggaatgaaaagattatttcttcttttcggagactacttgatcaacgttcaatccagtatattcaccgattgtctttcttgctctatcaaagaaacttgaaacttctttagaacttgattcagcggtttgtgatgtttgtttaactaattcttctgctttgttaatcaattcagtttgtgtagagtaaacatctggtaagtttttcttttcagcagcatctaaatatccaaagacattaccgaaagtttttgggaaaaatattttgaatgaaactaaaccacatactactggtgaaataaatctgaaaagaatgtttctctttctagctaaaactgaaccaaataaaccaccagttaaaacatataatgcattagggaaaaattcttctcttctatcatgtaatgaacttacagttgaaaaaatttctctttctgtatcaaagtattgttcagatttatcaatatatacatttttggaaagttctaagtatttgtagagttcttctcttgcaactttaatctttgattccaggaatgattcaactgattgttcttcctgtagtaattttggaacttgaggttctgtaggttttcctacagctgcatttatatctgtgtcatcgcttatagaaagttctcttggattcacatttgacctgtattgtttccacgactggatacgtaaagtaatgatgaagatgtgataaatatacttgactgttaaaatggggtattgttagtaatgagttcattcgattaattcattttcagaatgtgttaaaatttcaaattatacgtacttttacaatagatgaaagcattgtgttgtttcccgttcaatcggtctgtgttaaatctgttgctattgtaaacgaagaagtaatcaatttgattaagagctgttcttaccatgcatgtctttccaggggatcccaacccctccacatgttcaattctttaccaattaaaagtcgcgactttgtctggcggcttagcagtttcattttaccaacatcaattcaccttgaactgttccattgaaatagagttctctagaaatgagcagattcttttcagcaaagaagacttataatgggtttatttggacatttaaaaaacgctttgaacaatgtttctataaaggattcagcgcctgcagctcctgttggaggtcctacctacagagagatcaatttatcaatcaagacaaaacttcggagttaattttggttcgttatttgtattagagaaatatatttttgatgaaatgtatgttagaaggtagtaatgcggaatgtgaagcaatagcaagttatgctagaaaaaatggaattgatgccacaagaactaaaatggagaatcattggttgaattattgttctgatagtgattgggaatggcttaaaagtaaaggaatacaatcaattagaatcccaattggttactggacggttaatggtggtcaatttactagaggcacaaactttgagtcaatatcaggtgtttatgttaatgcatggaatattttaaaggataaatatattaataaagccaaacagtataatatttcaatacttgttgatttacatggattacctaaaggtgcaaatactggagatcatagtggtgaaacttttaaagaagcaggattttggaatgatcataaagctattgatttagcagttgatgtctgtgcatttattgctaacgatttaaaaaattatgataatgtttctggactccaaatagttaatgaatcggtattttcaaataatccaagtggacaagaaagatactacagaaaggcatcaaatgaaattagaaaatataatcaagacattccaattattatcagtgatgggtggtggcctaaacaatggattgattttctttcacgtgaatcaaatggtaatataggaagtttaggaattgtaatcgatgaccacatttaccgttgttttagtgatgatgataagcgtaaacgtgttgaagatataactaatgaccttccaaattctgttataccggaagcagcagataatgctgattttattattggagagtattcttgtgttttagatacccaatcctggaacaactcaggaaatgcaaatagagatgaattggtcaaaaactacgggaacaaacaaacagaagtatttaaaagaaaagctaaaactggtacttatttttggactttcaaatttcaaaatggtgatggtggtgaatggggaattgttcctatgatagatagaggttgtattccaccaagaaatacaaatttaagagaaccatccaaagaagactttgataacatatttaataatattttccagcaacatcaaaattattggttaagtcaaaatcctaatgaaaaatatgagttttggagatatcaagaaggttttattactgcatggtcagattcagttgctttttgaaacttgataattcaagaatcgggcgagtagttgcttggagttatgctagaagaatggaacatactaaagctagaggcaatagtagatttttatggcaatgggatgcaggattttttgaggctttgaataaatttgaagaacatttccattaatatatgtaataaggtataaaatttattgttttttatttaatattactttttcacactaaagttggagtttgaatttttaaaattttgaagcaaaaattaaccatccaaaattgtttaaaaaggccaaaataaaaaatttaaaatgatgtaaaaaccttttttttaagttttcaaaagctactctcattaataaattacattattcatgtgctatgctacattgtagtcattaattaaagtaataattcatgtttttcacttttttgaaagtcacgtgaccaatacagaataacatcctaaaaaatctaaaaaattaaacttaaaggattgtgggtttggccgagtggtctaaggcgtcacgtttaggccgtgatatcttcggatgcaagagttcgaacctcttagcccacatctttttttacattttaacatgtcaatgtttctttttattaaaactattcttcttcagtctctgctcatttttaatgatattaatgtctaactattgattattacaaaatttatgtatcattacaaaattcgaaaaataagaaagtgtgttaaatattttcaaacttattcttcttgatcaaatattggatatttagccctagtttcagtaatcaatgaattccaatcattaatttgtgcagcattcaataataattgtttattttcaaccaatatattaactttctttaaaaatctaataatcattttaatcatattattttgcttttctatatcttgtttaactgcattatcagcaatttttttatttattgttttacgacatcttgataaaaatccatcaaatgtatcaatttcaccattatctttcatgaaaaattgcccatcttgttcaaataatttaagagttgttaacaaacaaacagaaactattgattcatcatccttgacaccacaatcaaaatatttattaaagtacatttcccatttaatcgaacctaaaagtaaataatttctattttcttctaaaattttgaagtaataataaattgattcaaatagttgttttctataactcaacccatcatcaattttatgtttataaggtccaataaattgtgtatgtatataatctttattcggttttatttcagattccataattcccggaattattttactcattaatgaaattgcaatatttggtagtttattcaatattaaattaaaattggaaactgcaatttgtttgaaaaataagtttttatggaaaatgaatttttccactgataattcagagtatttaactgattgttggagagacaggttttctataaacttttcatcattgaatgagtacttgatactattaccaatacttgctagcaaaatttcattagtgattgtattattaactaagtattccaatgctgcgtccaatagatcatatttaactatcaatataccaaaacaaattgatgcgttttcataactactctcatttgatatcttaacaggagttgaaagctggatttgaataataacattaaatattctcatcgcctgttcattgtttaactcaattatttccaaaacatttgataacactttaagacaatctgaagtattagctgtctgtgtcaatttattcaaaaattcatctaagtatttggcaggatatttagagatgatagttgataagattttaattgagatgttgacaatatttgcctgatttgagattaattctttaaggaaaatatcaatacctatattgatatcaattgatttggaaacttcattgaggaaaacaagtgaaaaataaacatctttattgttatttaaattctcaataacagttccaattgaaaattcattaccagatgcaacacttaaaacagcaagaattttagaaatcttaagatcagttatatcaccaaatttatgaataatcgtagaaatattttcatcggatgtttgttgtaataactgtttcattaaagaaggtgaaatatcatcaaagttatcaaatgttattaaatcaatgatcattgaaattatgatatccaaattatcagtaatattaacaaaactcaagattttattcataatttcaccaatatctgcacaatttgaactattaaactttttctctgtatgtaatttctcaattgagtttaatattaatctaccttcatattcatcaactaagttagataatgcaaataatttaattagtttgatagcagatgagtttaattctgcaatatgaacatattctaaacaattcagcaaaatttgtttaacccaatcacttgtcatagattcaactattaagttagattcaatcaattttcttatagaatctaaacttgtcaatgctaaaacttcagatgttataatgttagcaaacataaaaagtactttttcactagttgaacttgacaatttcaaattacaacataatatgaccaatgaatcaatagatgaaagtctgatattcgttgataaattactatttaatgatttttcaattaatacgtcagtaaatctttcagataattgattgatagatgggttatttagtttcaaattattcttgtaaattaaattgatcaaagatagtccatcagtaattgatttattattcaaatcatttgataaacaagactcaatatactctacaatatattgaaatccattacctaatgaatcaattgattcatatttcaatagtgtcaaataaaatgtagttaccccagattccttcaatgtacttttccatagttgattaattttaacaacaaatttttctgtataattagtattcaaaacctctagggcatttgttaaattagtcaagagtttgataacaacattaacattttcattaccgattgtatcatcattattttcaacaaattgataaataaattgacataattttgcattattatttattaatataactgtagggatcatcatcagattgcatacttacatcactatttcttctacctgtagttgtctctgccatggattttgaattaagcagattgtaataaataccatcttgagaggaattagcaaataccaaagatagagtttcaagtagcatgattttaacaaatttattcttttctttaagtaatgaatccattaagatattaaagttgtatttgaataatgttgacaatttgattggaaaatgtttaataataacaatcaataggtttaaagtttcataacgaattttccatgaacaattatcatcatcatcatcgtcatcatcttgttcgtattcactataatcatcatcctcatcgtcattatcgaaagatccaacatcatcatctcatcattggcatcattatcgttataaggatcataatttatcaacaaaggacacattgataagcaatcattcaatagagattctattagagtcattattacaattttcaaactagtttgaccattcaaaataattgattcatatctaattgtatcaatattttgttgaactttcataagtcttcatctactatatccaattgaattaatatttaaacaatctatagcaatattccaaatttgtgaagttctactatttaataatattggattaccagtgatacaagcagatagtatgactaacagttttatctttgattgagttttctccttttgtaaatagttattataattattcagcaatttatcaaagaatagtttaataataaacaaattttcatttttattatcaatcttaccaattaggacatgaattgctaatattgatttctttgatattatactatcagcatagaaatatatatcaataaggaaatttaataaatttgagatctgttccttactcataaacttaccattatattcaaccaaatcattcaagatttcaatttcatcaatttgaatatcttgaatactattatttaataatttaggcattatagtttcaattactgaataatgaatgtttttatcatttggtaaatttttcaaaatgttatgaatcgccattgtatttattgttgaagtaattgaaatttttcttttatcattgattaataattgttgaataatagagacaatatcagctcttaaaattgatggtaatatttgaaaacttttcaatgattgtgtacgtacttcactaaattcatcatttaaacatttaatcaatattttggaatatgtttgaatttgagagttatttatattgccaacattattaatattggtcatttccttttcaagatcattcaatgccatgaatctgagatcaggatctgtatcccttgtcatgatcaatagatcagggacgtatttacgcatcatactgctcattgctgtaaaagaagcatcatgtagaaagggttgaaaatattatcactatgcgtgtcagtcttatattttcaattttaaatactagtttaaatgagtttttttattttagataaattttattattattatgtaaattatattataattattatgaagtagaaataaagagtaagcaaaaaaaggtgaataagtaagtagtatatattatattattaatttatagggttttagagtatagtaaaatatcatttttgaaacagtgactcaagtagttcttgatcgtatttgttcatattggaaaagtccttatcctttatcatgaatgaagaacttgttgttggaatcgtaccgattatatcattgtttgtttcatcattatttttaatattattgtcattatctttctccttttctctttctgtataagtcttagttggataaatatcatccattaaagttgtattagttttaacattagcaacttgaggaccagtaaatgaattattattagctaattcagcagttaataattgaggttcatcaactaaggaattaccaactgaatcagatgatgaaattgaatttgatgaagcaattgataagaaagaacttgatctacgtggatttgataatgaataaggatggaaatgagaatttgaatgatttgaatgatttgtgatatgtgaaccattatgatgtaatggaccattatgactatgatttgaacttaatgattgtaatgattgatacgatcgattagaatgaattgatgaacctgtaggtacatgatttaatttatgtgattgattaattgtcgcctgttgtaataaattactattagatctcatattaaagttgtttaaattagaatgtgatagattattagtgtgattattggtattgttattaataacactactattatcatcattatttgaatagctcggtccgattaatggaaataaggggaataaagaatcaggttcaacctcaccattatcagttagtattattatttgaagataggtaaatttcaggagttggagtattattttcaaaaatatctagtaatccattccctggagttggaggtagtacatcaaacatacttgccattttattatcattattattattattattatcggtattattggtgttggtattattggtattgatactatcattagtaggagcattattgttagttttaacgttactgctgccagtatcaacataatcaaaaaatgaatttacatcaaaattattaattccaagatcatttatttgaggacttacactatttggactagtgaatgaaggatcaatggtggatggatcagataagttatttaagaaattattgaaatgaacattcattttattcaaaggcttaatatattcatcaaccggtattgtaatttcaccttgacgatgataattattattaatgtttttaatggagttattaatattcttgttattctgttgttgatgattgctttgtttaatattaatattaatattattattactcttattattttgaccattattgaaggaggaagatctgaaattttgtaaaggatctaaccctatctgtcttgttctattattactgtttatattattattagtattagtgttgttagcactcataaatgaactatctgataacattgacaataaactctcagaattccccattggaggagatgacatgtcccaagaagattgcaaaatatttgaaatactttcattattattattattattattattattattattattattattattattattattattattattattattattattattcatattcatattcttattcatgttattagtatcactattcatattcatattcatattattcatactaatacttaaattattattacttattggagatacatcttcacttgaaaaagcatttaattctgcctctttctctaacaattccttttctttcttctttgaagattttctactattactctttggacaacaagtacaatcaccctgtacaaaacagggacaatttggatcatgttgagtactgaattaattttctttgtaacaattacatgcaatatgatgcatttcttttctttctttgttccttacaatgaggacattgagttgaaggtctaccctttggtttaatcatcattaaaggttgatctgtatgagtacaagttgtaactctatgaccacgtatacaacgttcacaagcgtatttaacaccattaattaacaccatattttctctcttatctaatatctattatatcttattatattatatactatatacccatatcacagtgtacttctctgtataaaacaataaaaaacccatcctattaaataataataaatcacggcaaaaatgcatcaaaatggaacattgtaaatcatcaacaaacagataaaaaaaaaatttaaaaatttaaaaatttcaccaagtcccgacttttcattatgtggctttatctattcatctactccatcaatttattcatcaattataaattctattactaattagaagaaatactatatacaatgacggttatcactctatcggataccctatcctctcataaacgtatatgggctacacttatcactaataaagactatctccctggtgttttaaccctaaattattcattgaaaaaggtcaactccgcatacccgttggtaacattatatacaaatcaattagatattgatgccttgaatatcttacataagaacaatatcctaactctgatgattgacccaattaaaccaaattcagatgatattgaccttgtagataaaagatttattgatacctggtcaaaattatattttttcaaattaactcaatttgatagaattgttcaattagattctgatatgttaattaggaaaaatttagatgaattgatgactttggatttaaatggtaataaatttgcttcaactcatgcttgtgtatgtaatccaaataagtttgatcattatccgaaaacttggataagggaaaaattgctcattcactgatttatctcatccaactcacgttgcacatgcaaattcaggtttatccaaatgtaattcaggtatattagttattaatccatcattagatttattcaatcaaattcaatctaaattgaatgatacttgatgcagttaattcctatatattcccagatcaagatttattagttgatcttttcaataatgattggttagctctgtctcataattacaattgtttgaaaacttttaaaaatgcacatccaaatatttgggatttagatcatattaaaatcattcattacatcttatccccaaaaccttggaacgttgatcgttcttataatgatttgactggtacttttcatttatggtgggacgaaaacgatgaaagaattagtaatattcaataacttttctagttttatctccatttttgacttacatttataatttctgcttcatttttttattcccatctctatttttgaagctgcttcttttttttgatctaattttaattttaaagctctatatcccttttttaatccaaaagatactcttacactaattcttacttttgaatagtattacctctagatctagccttctcaacaactccattactaacttcttctctatcataactacttgcatcaaaactcgtatttcgtatactcttctcatcaattatagcgttatcaatttcatcactatcattattcatatcataatcatcattttcatcctcataatcataatcgtaatcatcattatcatgattataattaacatcatcgccaccagtaccaccactaggtactagtaacaccaccaatgataccaccactaacttcatcaactatagataatgattttctatgataattttggtttggagattgtaccatacctactgatgatgatctactgattgatgttctaataggtaaataagtcattggtatatcatgatactctctattattatttggattgaatttataataaaaaaattgataagttataataaaatttaaactcatttgaaagaaagctgcaattttgaaaattgtaccgacattatcagttccgtaaaataaataactaatctttgtaacatcaccacctaaccatgataataaaagaataattttgaaaattttcaacatttttcaatctttgaaataataaaatttgcggtattggtaatgtactttcagttaagaatgaaattgatccaataattaatccaaaataagtagtcccataaaatgtaaattgtaatattgttaaaactatgataaatccaactaagaatttccaaaatgtcatagaatttctccattgccagtaattgaacggtcttatataatgataatcaaataaccttattatatttctaaataattccaaaatacattgtataatcagtaaaatgtttaaataaacacattttaaaaccacattcaatacacctaatattaagttacttaatcaacagattattataattatcatgaatattatattgactaaacgtttcattaatctgttccttattcaattgaataaaattatcaaatattatctcccaatttctttgaaatttttcaaaacggattgaatcttcactacgatattttaaaacaacctttaataaaataatctgaataaaaaccattatgaaacattgtcttaataatgttaattcaaatggttcattgaagaaataaaatatacgtaaaatcgatgaaattaacattgtaccacaaatatcaattgaaaatccttgtgatgattgtttccttctaatactcaaaacagtactaccatatgataacaatggtgtacatgacattatcaaattgaccaatgttgatacatatggcatcatttcaggcgatagtacgatatatgccattatttcacctgctttgttgataaaaacgaaaggtttccaaaaggaaaaggaaaaggaaaagaaaaaggagatcaatcttaaaaaccgttaccaaaatatcaacatgtcaaaaattttataacgtaattagtagatctttggatggatgatcttcattttcccatgtttattatactctaggatccaattgatgctagagaagcaattgactaagcttacgatcaaagatttgacaaaatgctttagtaaattaggataccaaccacctaaaatattgaaaaaggccgaacttttgaacaaattatcaatagatattggaaacactaaacaattctacaacaacattccagatgatcaatacacggagcatataatatcactggatatgggactgaaaaacatgtcactttcaagatttactattgaatcgaataaatccaaaccaacaaaaagcaagccagttttacaacaatggtttaaaatagatctagaaccttatgatgaatatcaatttagtccagttaattattcattaataactgatgaatttttaagagaatatctcttacctaaaagattccaagataacaatgtttataccgtgatagctgaaagacaaaggtttagaactaatggtagtccaagggttttagaaactacattaaaatcaaatacaattgaagcgatgcttgcaatgggattgataactcataatcgattatcaccgggaaatcggataagttttcattcaagtgctccaggtgcaatggtcaattattggcaatctaagtattattatgatgaaagtatggataaagtgaaaatcagtgaaaaagattcaaagaattttagaattgatttagccttaagtatgttacatgatgcattgaatacagctggtataaattttgagaaaaccaatctaaatgagtcaattgtagataaattacgaacaaggaatcaacatggatttgaaatacccgatggattagttaagaattttgataagaggtgcaagaaaagtgagtttgttgagagttgggagaaagcatgggaatataagtcaaagagtagaagattatgggaagtttccagactattaaatttatgcaacaaagatgagtataaggtaccagatttagataaactttggggtaaggttaaaggtgatgatttagctgattcattattacatggattacaatattttgatcatttacaaaatagaaagatatttattaatatgatatccaaggataaaagtgacataaaagaatttttagaagattaaaacaaaaacaagcagtaatagatcaagcttttataaaaatgtataaatataaagagaaatgaaatggtatttattgtacagtgtataaaactaataatgaaattaaaatttaaaattttgttttaaattagagtaaggtaaaccctttgattttaaatcatgagcataatcaattaattcaaagaatctttgtctcttcatttcaccagttttaactctaagatccatcatttgatcatcccaaaatttagcaacgaaaccttcattttctgtacctttgattaaatcaaacatttcattacaatattctgcatcctttaaattacccataacatggaaacctgaaccatcacctctttctgcaacttctttttgataatcttttaacatttcttcagttgaaggtaatgataatcttaccagataaaattctagcaacatattgaccttgagcttcagcaaatgggaatggtataattgattttggtaaacctgctaaaattaatgaagtatcaggtatatagaataattgtttatataaatcatgtatatttgaaccatcagttattattggatttgcaccagttgtatacgattttaagaatggaatttcatagaggtaacctgtacaaaataaaattttatcaatatttgaaataactttaccagaatttgtaataactgatctattattttcaaaatcatattttgcaataccatcaatttgttcagtttgattttcaataacaccttcaaacattggtttaccaacacatgacataacaatttgctttgaaacaggtaattaattgagttagaaatatcaatacctgaagctgaattaccaacaataagtactttttgatctttatattttgaacaatcattataatatttagcatgagaaactgaagttggatcatttttaaaccaattaagtaaacctttagcctttggtacaaatggagtatcgaaatgaccagtgagctaaaataacattatcatataaatttggttcagtattttgattagttgttaattcccatttattattatcattatttttcaataaagatgaaacttttgtattaaatttaaaattaacaaaatttggaatttccttttgataatctaataaataatctaaaacttcagttctaattgggaaagtatttgaattttcaggtaatggataatctttatatctcatcatttgtttaataatattagtttcagtatgtttatacattggggataaatgaggatcattatcaattacctttaaagcatttttattattttttcgattcagttaattcaaatgaaacatttgacttatcaccagtatgattccataatccaccagcttgaggacgtctctcatagacatcgatagctttgaaaattttttgtgcatttggttcagctgcaattgctttagcaaatcctaaacctaaaggacctgcaccaataattgcaattttaggagttgtcatatttatctatatgtggttatattaaaaggttacgttatttaaaaatagaaataaaaatagagttaaaaaaagattaaaaaatagttcaaatactaactgaataataactgaaaaatactgaaaaatttcatctaaactagaatcaaaaggcatgggataaaatttataaaggaaataaagcttataaatacgatgataatgcaaactcctcatccagtttacattcccattgattaataagataatagggagatcagtggaaagaaatgaagttatttcccaaacttgtcgtcccatgtttaagatatcaaatcaagtgaaattactccattaggttattatcacaccataaaaaattttaaacttgaatatgaggctcagcttattgcatgtcacgtgccgtggcgcgtttttggcatttgtgcgcaatgtcacgtgatgatattacgtaagcatttttttagattttttcattttgctgcttacatgaatatttcaatgatgattaatcaatgttgataagaataaggttaagattaaggttgattcaatactcatttgtggaacaatatatacagaaacaaatgtcagatactgaaatacccaaggctttaattaatgttaaaaatgttatattagttttatcaggtaaaggaggtgtaggtaaatcatcatgtaacaactcaattagctttaactttatcattaaaaggttataaaattggtgtattagatattgatttaactggtccttcattacctagaatgtttgatatggaaaatagtaaaataatgcaatcaaataatggttggttacctgttaatataccttccaaattcaattaataatattaaagtaatgtcattaggatttttgcttaataatagaggtgattcagttgtttggagaggtcctaaaaaaactggtatgattagacaatttttcaaagaggttcaatggggggaattagattatttaattattgatactcctccaggtacttctgatgaacatattgcaattgcagaggaattaaataaagtacctgaaaaaatttatggtgcagtaattgtaacaactcctcaattagtttcagttgatgatgttcgtaaagaaattaattattgtgaaaaggcagcttttaaagttttaggtattgtggaaaatatgtcaggttttgtttgtccttattgtgctgaatgtacaaatattttcagtaaaggtggtggtgaaaatttagcaaatgaattaaatttaaaatttttaggtgctgtaccaattgatccatcatttgttgatataattgaaaatcaatcaaaattaaaattagaacaaggtaaaacattatcagaattatacaatagttctaatatgtatccaattttcgaatctgttgtggaacagattttataagtatattaaaaaaaaagggtgtgtattttatttagaaaagagttatttacattttaattttacattttacttatacattttctttaattcatcaattaatggactaacattatcattttcaacatgaatatcatcaacaattttatcaacattagcaattacagttattggttcataattgataaaagatgaattattaatttttttattcaattgaaacttcaatccaggtccaaatttatttgatgataatgttagaattggctttgtgtttgtgtttttactatcattctcttgttttaatttttgcatttgttcaatttcattctcaatatctaaatattgctgtaatttaattggtgaaattttagatttatgtgaagagttagataatacatcattatcatgatcattatcgtgattattattattattattattattattattattattattattattattattattattattattattattattattattaccttcaatccttgaagtattttcaataacatatttttcaatttcttccattttttcatcttgtttagcaatttcatccttcataccataattaaataatttttgataatgatattgatttacactattaatatcaaataatctttcacgtttagttaatttaatttctaattttttcaatctatttataagacaatctaattttttcttattcttcatcgtactatcaacaatttgttcaatttcattattaatttgttcatattgttgaaatttattaataggtttactaccattattattaccaattttaaacattgaaccaaatgccaatccttttttaactttcttaccatcaaattcattatcattattcttaccatcatctttgattatttgattatcatttatatcatttactctaatatcatgtacaatatcataaattttttcaacattctctaattttccaattaattcatcttcaactttaataactgaattcaattgttcattaatatcatcattatataaattaactgtattaattatattatcattaagttgctttaaatgattatttgcatttgttgaatgtgaaagtatataagataatttaaatttcctttgagctggtaatttacccttattgtttgtatttgtagtcattaatggactatatattaggatattctagcaactttaatgtgtatattattgtgttgtctagataagaaagaatcaagatcaactcgaagaacttactccgagggggtgtcagaaagtatgcacacattaaaattttattaaggtgataatcaaatttctgattctattacaatcattgctttttttaagacaatgttattaacattaaggaatagaattggaacattatattggtatatcgattacaggatgttgtacaaatgtttatatatttgaaaaaattattaatattaattcacaaataactacattaattacattttcacaaacattattcatttttttaagtattgcaatttatcttgatcataataaatattggaaaaatttaaagaaacaaggtaaagaaaagaagttcaaggattttattaatttagaatttctgataccattattatcacaaaagcttgacatctaatatgagtaattatgttttccaatataatttaccaatgccagttcatattattttccgatcatcaagtactgcaatgacattattattaggatggttgatttggaagaaaagatatacatgggacaaagtttatggatcattgataattgcaattggtacagttatatttacaattgctgttagtcaaaatgaggttattgataatgatattggtaatgagaatgattttgataatgatgcaaattattttatgggaattttgttattattaacaagtacgataataaatagtcttacatcattatttaaagaagatatttatttacgaaataagaaaggaaataagagaaacaaaaacaaacaaacatttgaatggcaagaaattttatattataattatttatttggtgtaatattttatttaccaatgattggacaattataccgagagacttatattgtacaaaatattaaaaagattggacttagaagattattaattaccaattggattacacaattaatttgtattattggagttaatatgttagttttcaagataagtgcattatcacttgcaattatactgttaattagaagatttttatcattatttttaagtatctatgtttttggaactaatgttagttcagttggatatactggaattatatttgttataattggagctattatttattcatttgcaagtaagatttattatggcagtgattgtagaagtgaatatgaagtgttaaagaaggagtgagttgcctaattaggaaggttaagcgaggaaattggaaaatttatttattatggggaagaattggaggattattataataggattgattctacagtgggttctttattagagtatagagatagacattatgattacacgtggattattgaagaatgtattgagaggtagtgtgaggttgaatagtgtacagattagaagtattagtcaagttaagaagaatatagtatttacccataataataatgataatagtaatgttaataaattattattaacattacaaagacaatacagtattaaaagtgaaagtgcaaataaaggtaaaatacaggtggaagaaaatgaaacattagataatgataatgataatgaagaaggagatgaatattatgttgatgtaagtaatttagagacaagatggaattctttaacatatgaatcacaacaagatataattagttatcttaatgttaaacaagaatttggatggaattatttaaataaagaggagaaaaaggcgatttattttattgcatatggtaattggggtccaagagatagtagtataatgtcaggagcagaatttgcatttaaattaatgactagtatgttattattttcagttttaggattttcaatgcttaattatgcaattgatgttgaaaagaaggaacaaattgagaaagatagtaattgatataagtaaatactgctacttacctgtatatataacactttaacagtagtaacgaataaacaagtcgatgagactgtaataataataatactataataatacttctataaaaagaaaaagaaaaagaaaaagcgtgtatttatttaatactgtagtaggacctggttcttattatagaggggggcgttttatattactgtttggtttattatattaaagtttttcttttcttttattttattttgttttgttttgttttgtttaggttcaggttctgtatctgtttctgtctatcaccctcatcacactacactcgtttgaaatgcctccaagaactttgacttctagagctcctcatataggtaatggagggaattcatcttcttcaaatactaattccgcttcaagtgatgatttagatcttgatttagataatttagataatccttttaatgatatagatgataataatgatagtagtaataacatatcaaatcctgttcatctaccttatggaaataatagttatgatgattcaactgattcatctgctgctaatttattaaattctactaataatattaattttaaaaataataataacatagttaacacatccacatcttcaaattcacctgaaataaaacaacattcaataaattataaatcttcttcatttagagattcttcaacttcttcatcacttttaaatcctttttcatcttcaaatagattaagttctcttaataatttaaatcaaactgctgaatataatagatatcctaaaaatttatcaaattcaagaattaattcaatgaattcctttaataataataatacaactgatttagatgatttaaattcaaatgctaattcaaatactttttcaaatagtgatagttcttcaaatccttttatggttgatacagatttttctccatttggtggttatccaacttcaagtttcccacttttaatagatgaaaaggaagatgatgattatttacataatcctgatccaattgaagaagcaaaatatgaaaaacatagaatttggaatgatttaaaatcaatggataaaaaatcaagttggactttaattggtttattatttttccttttaggtggtataggtgtttttgttattttacctgctcttacttatactaatgttgctaatcatcatcatagattagatggtaaaataaagaatgttggtattgctggttcaaatgctgaatatattgatgatggtacattaattttaactgattatatttatcctcaattaagtgcaattagaacttctcttattgatcccgatactccatcaacttattatacaagaaaggcaaaagatggttcagattggcaattagttttctctgatgaatttgctgttgaaggtaggaactttttatgacggtgatgatcaagttttggtatgcaccagatttccattatgatgcgacaaaagatttagaatggtatgatccagatgctgttacaactgctaatggtacattaaatttaagaatggatgcatttaaaaatcataatttattttatagatcaggtatgttacattcatggaatagaatgtgttttactcaaggtattatggaagtttcagctagattaccaaattatggtaatattacaggtttatggccaggtttatggtcaatgggtaatttaggtagaccaggttatatggcaacaactgatggtgtttggccttattcttataatgaatgtgatgcaggtataacaccaaatcaatcttcacctgatggtataaattatttaccaggtcaaagattaaataaatgtacatgtccaaatgatgaccatccaaatcctggtgttggtagaggtgcacctgaaattgatattattgaaggtgaagttgatacaaatattagagttggtgttgcatcacaatcaatgcaaattgctccaatggatatttggtatatgcctgattataattgggttgaagttcataataattcagttacaacaatgaatacttatgcaggtggaccatttcaacaagcagtttcagcaattacgacattaaatactgattggtataatagaggtgaaggtgaacgttatttccaaaaatatgcttttgaatatttaaatgatgataatgatggttatgtacgttggtttgttggtaatgatccaacattaacagtttatgcaaatgcattagcacctaatggtaatatcggttggagacaaatttctaaagaaccaatgtcaatggttgttaatatgggtatttctaaaaattgggcttatattgatttcccatcaattccattccctgctacatttgaaatcgattcaattagaatttatcaaccaagtgatgcaattagtacaacttgtgaccctgaggattatccaacttatgattatataaatgatcatccattagcttataaaaattggaattcatacatcatggaatatgtacaggttattcagaaacaggtaatacattagtaggatgttaagataattaaatagttataattatatatatatatatatatatatatatatacttaaagataccaacatttttttttcaaaatattgaagataattgatcatcagttaagaataatggttgtggatattgatcaactttattcaaactccatttaattaattcatcactcgtagttacatcaaatggtaatttcttaacaatatttattctttcatcctccttcaatttcataaattcaatgtattttttatataaattttgtctaacattaagtgatatctctgcaattattccaacataaacctcattctttctcattttcctattaaaatctgtatagaaactaggtaatttaccatcaaattttttcaaaaaattaataaatgaaataataggtgaaattacagtctcattatcaacatttgtacgacaatattcatcaaaaagtattcgtcgtgtttcatctgttaatgtattacattgatttgtgatatattcaggtaatttacataattgagtaatttctaaatcatatgatgaatagatattaatttgttgattttgtaataatttaataaagtttttacaaatttctgattgttcaattgtaggtatgtcatcagtttcaatatcattttctaaatcttctaaatctgatgaattaagacctaaatcagaataattatcatcatcattatcatcagatacatttacttcctcttgttcttgttcttcaataactacttctttaatttccttttttgattcaataggttctagtttgaaaacattcataatttcaatttctatatcatgacttattcttacacctctaatcatagctaataaacaaactataacatctctatgtttcattaatgtatcttttgcatcattgatatcaccttcattattgggtaattgccaaaatgatttattagttttaatattattataaaatttatttgcatgattagttataattaattgccaatcattagataatggtagtttatataatggtttaccataagaaattttttgtctcttcattaataaaaggataagttagttattagtttaaattatttataaaaggaagagtataaaaaatataatatttacatgttttgatgaggggtgtggatgatgaacttataatttagctaaaccataatcttttctattaagaactaatttaatctttgcatcaatacctgctttattatcatattttaatttaaaatatttaataacatcattataagttacaggttcaacagatttatcattaccaccagttataaaatttttaatttcaatttctgttggtaatcccatatgatgtggataatttgtaaaatcaccaattgaatttttcaaattttttggacttgaaattcttaaagaatttaatttttccatttgaattgcaattgattttgaatcttctatactttgatcattttcactattacttttattgaaaacatctaatgaaattaaattttcaacaattgatgatggtacactatcaattgatttataatttttactaattaatttttccttattctttaaaattaatttttcatttataaaatcattaaaatcatttttttcataattactcattaatttaccagctaattttaattccctttgtaatgcattttaattgaaacatttttattttttaataataaattccaatttaaatttaatgataatggagatttttcatttaatttattaattgttttaattgcaaattcagaaccatccttttctaatgatttaattatatcattaacagatttttgagtatttggattaaaacatttttcaattgtatttaattcattattattaaatttaaatttatgattttttggaatttcaattgtaaattcttcaataattgaattaactaatgcaaataattgatctgttgaatttttattaaaaattgttgaattatttcttctatcttgataaagttcaggataatcaatttcagataatcttaattttaaatcatttaattttgatgaaggaacataatgagtaccataacctaataataaattatcaataccaattaattcatcacctgttaaagataaataataacctaaattaaaatctaattttggtaaccaaaatgatgtaccgacatcattgaaaaatccgattgaagtttcaggcattgcaaatctagttgaatcagttataactctaaatgaattatgaacagataaaccaacaccaccacccattacaataccattagcaattgaaacaattggtttaccataagttgataataaataatttaaattatattcattttggaaaaaatcaattgaattatttgaattactagataaattatctttaacacaattaactatatcaccacctgaacaaaaagatttttcattagttgaatcaattataattaatttagcagaatttgaatttgagaattctactaatcttggtataattgaattacacatttcatttgataaagcatttaatttttgtggacgattaagtgaaataattctagcattaccattaacagagaatttaacactattttcagatacaaatgaagacatttgacgagcaaatttaaatttatttacagatagcattgtgtgtaatatgtgatttatatcgtggataatatgccctgtttatataatcaataatcaaaataaaataataatattctccacttgaaatctgatgccaaagattccataatgctaataaatttcaaatatttttccactcactgagaaatttcagtttttctcactgtattttattaatattaaatattaggagggggaacgtctcgtcggtagtcggtagaggggatatattacctctctataagttagtatatagtatactaaatcattggttactacagatactactaccattactaaccatactatgtggatataatagcaattgtagaataaaagaaaagaaaagtaagaaaagaagtaaaagaagaaaagaaagtaaaatataaatgagccttcaaatacactataagtataaataaccatccttaaagtaaagtaaagtaaagtaaagtaaagtaagaaggatagtagttagtatttagtatgttatgttgaatatatacttatctcttgatgatgttctatctcatgtattcaatgttcttcttctttacatacacacatgggcagtatcactcctaaacttacgtaattccttacatcgtatataactatacagcctagatcaaaacacgttattaatattttattatctaataattttatcactactaaaatatcaccacttttcaccattttcactacttcattatttatttgctgttcagtcaaacaatcacagtattcctatatatcctccccccccctttttcaataatgacaccaccaaaagatttcttctggactgatgaaaaagatgctcattctttaagacgtaaagcaatacttaaagcacatccaaatgtttcaaaattaactggtcatgaacctttaactaaatggatttcactaggagttgtcattttacaattctcaatagcttattatttaaaagatactcatccattaaattggaaattcttattattagcttattgtattggaggatttgcaagtcaaaattgtttcctatgtattcatgaattaagtcataatttaggttttaaaaaacctttacataatagattattctcaataatttcaaatttaccaattggtatcccatattctgcatctttccaaccttatcatcaattacatcataaattcttaggtgatgaaatttatgatacagatttaccaactccatttgaagctttcatattatcaagtgttttaggtaaagctttctttgcaactttccaaatcttcttctactgctttacgtccaatgtttgtaacttcaatagattttacttcaattcatttattaaatgttctagtacaatttttcgttgattatttaattgttaataattggggttggtattcattattttatttcctaatatcttcattctttgcaggttcattacatccaactgcaggtcatttcgttgcagaacattatattttcaatccaccatcagattataaatcttttaaatctccacctccaactgaaacttattcatattatggtccacttaattttttcacttggaatgttggttatcatactgaacatcatgatttcccctacattgcatggtcaaaattacctttattaaccaaggaagctccagaattttacaataatttacctcaacataaaagttggtgttggataattgttgatttcatacttaatcataatgtttcaatgtattcacgtgttaaacgtcatactgctggtccaagagctagaattacagttgatttcaatgataatagcaagtaactaagtaagtagtgtatatagcataataatagacatagacgcgtcttgttaggtaagcttactcttaaaagtaacactttattgccccataaagtctttgaagacatgttccagctgtacatgcatgttcttctttaatagggggataactttgcttgaactcatcgcatggacagtttggaaatggaagattcacatggaatgcatcatcgtgttgctcgtctgagtataaccgttgatgataatgttgaaagggaaaaattcttattaaatatcaatgggaaggatggaagtaaggataataataataataataataataatgataatgataatgatgatgttaataaggaaaatacattaattgaactacctaataagtctaataatacgaaaaaagcattgaataaaaaggaaaaacgtaaattacataaacaaaacaaaaaattagcaaatttaaataagaaaaacaatgaatctgcaattgatgaagaatcagagacaggtaatgatacaactttcattccacctccaccacgtcaaaagagaagaagatcatcagttgcaccagtaattgtaagaaaaaagaaatttttagctgaaatacccaaattatcaatattaaatgatagaactaaaaaagtttcagtttcttcaatacgtgatttactcttatattcattaactgatatgaattctaaaaccaaactggtgtagtttaatcaatagaagatcagttgataaatttgttattgtttttttacgtggtttaacaaatgatgaatttggtatgccaattttaaagaatgaaattgatccaagattaattaataattaccccatcgatgataatttatcaaattttaagtaaaatcttcaatgaagtaattccaatgattgcaccaggttctaaaaaatgtattttttcaacttattcttcacttatatcatattcattatcttcaaaacagaaagctgcaattcaaaaggaaaatcaaaataggaaaatttcatatgtagacttatgtttagtcaattgatgatttaatcttcaataattatccaattcataaagatacaccaaatgcaacaactgaactaattaatttaacttcagatttcaaaagtacatctcttttacataatgatcaaaaattatatgcacttgattgtgaaatgtgtagatcaattgatagtagagttttagcaagagtttcattaactgattctgataataatataattattgataaacttattaaaccatctgaaccaattgttgattatgttacacaatattcaggtataacagaggaacaattgattggaattgaaacaactttagatgatattcaaaatgaaattttatcaattgtttcatcaaatgatatattaattggacattcattagaaagtgatttaaatatacttaaattaaaacatcctaatataattgatacatcgatttgttttgatcatccaagaggtccaccttcaaaagcttcattgaaaatgttaatgaatcaacattttgaaaaagatattcaaaagaaaatttcaggtcatgattcagttgaagattgtattagttgtatggaattagttaaattaaaaatttctaaaggttatctttatggtaaatcttataatatggaatcattatttaaaagaattcaacaaaattataaattaattaaagattcaaatggtgaaaaaattccgaaaaaatcagttgtaattggttattcaaatgttaaaaattttggtcatcatgaaaagcaaattcaatgttttaatgatgatgaaattattgataaatttattgaaaatcaattagagaatgatttaattatactaaaattaagagaattagaatggtttaaagaatattcaccaaataatgttgttgaaaatttacaattacctaaaactaaggaagaaatgttatcaaaagttaatgaaagaataatgaaaatttatgaaaatttaacacctaattcaattttagtagtctgttcagagaatggggatacaagagaaatgtttagattacaagaattaagtaaaacatttcaatataaagttgagaaaggtgaaaatgatgaaaatattcatattgaagagaatttatggaatgaagaaaatgctgaaaaattaagtaaagcattagacactgcacgtgatactctattactttgtactttaaagccaccatcaactacatctaaaccatctacttcaatttcacctccaccaataacagatgaaactccatctcaatcagttgtgtaatcttctatagaaatagtataaaaatctaacttaataatacgcgtaagtataaacatgaatttaaatattttccctttccgatttccttccaatttccatttttccttttattgattttgatagtaccaggtaacgatggatggtactttgttaatggatgaaagtcggcttagatctaagaaggatctcattcaaaagacgtaagtatgttgcattacagaaaagacaaagatcagataataatgaatcaatactggaacaagtacaaaatgaaaataaaaggaaaaaattaactgaattaaacgaattaacaacttatgaaaacaataataatgataataatactgatgataatgaatcaattgaaattataaatactgattcaagagttagtacagctgatgcagaggatataacatataatgaagtacaatcaattttaggtgtaaattatacaataccaaatagtataaaggaagaaattattgaattatttgaatcatttccaaatttaaataaaatttatgaaatttatagtaagattggtgaaggtacattttcaagtgtttatttaggtaaagagaggaaagttagtcgatttaataataatcatgataataaaaggaataaaactatcatcattagttgcattaaagaaaatttatgttacatcatctaccacaaagaattttcaatgaattaaatttactttatattttaagaggtaatgaaaatgttgcaccattattagatgttttgaagatatgaagatcaagttattgcagttttaccatattataaacattcagattttagagatttttatagagatttaccattaattggtataaaaaattatatgtttgacttatttcaagcaattgaatttattcataaacatgatgtaattcatagagatatcaaaccaactaatttcctttataatccattcacaggtaagggagttttagttgattttggattagctgaaaaatatgaaccagttataaataatgcatgtccatgtataaatggaggttttaatagtgaagaaatttcaaaatttgaaaagttatcagtttatcccaaaaatggttatcttaaagatgatcaaagaccctggtagaagagccaatagagcaggtacaagaggttttagagcacctgaagttttatttaaatgtaacttgtcaaactccattaattgatatttggtcagcaggtgtaatgttattaacattattatcaagaagattcccattttttcaattcaactgatgatattgaagcaataatggaattaattaatatttatggtacaattgaaatgaaggaatgtgcaaatttacatggattaaatttagattgtaatataccaaaaatgaagaataaaatttctttttctgcaataattgcaaattctatattaatggattgtaaagagggtgatacatttgcagaagattcacctgcatgggaaattttaagtgtaattgataaaaggggtagaataattgataatgaattaggtaatgaatataataatgcaattgatttattagaaaaatcaatggaattatattcaaataagagagaaaatgcagaaaacttgttaaagcatgaatttttcaaagaatttagaactgaagtggaagaagaggatgaggaaggatatgccacgatgatgatgatgatgatgatgatagtgatgttactaatgatgagaataataccccgtagctagattaatatttataaaaaaaaattataaaatgaaaatgatataatataaaattaagttttatatattatatagaaaagtaaactttgcaagacgatagtgattttggaaatagaaaaaaagaaatgagttgtaattgaaaagatgattactatttttcatttgattcagttgttgtatcagtattaagagttttaactgatgatgaacttgattcattcaaacctgtagttattggattaatttttctttcatttccaagaatttcttcatccattggagcaaattttaaatcaataattgatttaaagattggtgatggagtcattgaacctgatttcctataattttttaaataattataagcttcaatataaggtaatttaattaatttttcatttaataattcacgttcctttaataataattgtttatttaatttaaatggtataatttctttatcaattttatttaattgatcataaccttcacctttttgtaaatcaataaaacaatgtttaatataacttaatttacctgccttgtataaattcataatactaccatattcagcaattgcattttttctataatcatcttgatattgttgttttgaagcctttttaacaccagtccaaccaagttcaattaaatcttctctacttaatgctaatccttggttttctccatgaataaggattaaataatccctgcccagaggatgaaaatagaataaactaactttgaaaatatggaatgcaaaataaatacattgaccgaaaattccaacaggtgcatgaatatcactataaaaggaatcagcttgtgcaggtctctctaaaacttctcttaataaataaacaattaaatctgttgcataattagtaagacaaatacctggagttggagagataaaatcaggtaaatcagtgtataaccaaacaaaaataaatgatataacagaataatgcaggaaagaacgttcattaaatacaggaataatcaattgacctggtaatacataatctgaaactttgtcattgaggttgttaattgattttaaatatttctcattatcagccttagtttcaaataaaattgtaccagttctagtaagtataccaggaaaatgagaaattttaaaactgattggtactttatcataaaaaattgaaggggagaatataattggaactttttcaaatattttcaataaatctttaaaagttgtatcattattaacttggaaacaaaaatcattttcaaatgatttcttcatacgaatatagatatcaaaagtattttcatctaaagataaaacttcattattagtttcctcaacaactacattttcatcaattgagttagagtttggaggagtaggatatgtagaaggattatcaacagtcattgtgataaagagagagaaataaagaagagtagaaaaggaaaagaataaaagatacactgttctttttaaacaaaattctggagaacaatcagaatcagaatcagaatcagaatcagaacagaaaactggtatgttaatgacatgtgcgtgtgggggaaattgatgataatacaatagattaattacgtaaatttttagaatttttaaattaatgttgtttattacgtaatgattatataatattaaacaattaacaattaacttaagcaattgataaaatatcagaatcaccagcatctaaaatggataagacaccaactctgaataatttaccacaatgcggtacctaattcattgttaccaccttggaaatagtaaacaggagttttagataacatagcgtaatattctaattcagattttcttaaaactggagtatttgcagcaataataatcatctttgccttaccttgtctgatagacttaatggttgatttgtaacctaaagtatatttaccagatttaatggttaacgctaatttagcgttcataaggtcggaattcttcttagtttttggtgcctaaattaaaacaattttgtactatttatgcaaataaatgcatttttagtttatgtgttagtatgattattcattatagaatagtgttattaagtaaaagatatactgaccatctctgtgtatttgttcggttattcactccggtctgggattgtcttctaagaagtaatgtaaatggtataagaatggttgaaaaactgaaaaatatttttttttccactactatgtaaaactctctgaatataattttttttcccattcgctccttcctaaaagagtaagtcaccctgaaaccacacacaaaaaagaaaaaatcacccatttctgtgcgtcaccccgcgcaccaccaacctttccacacattgcccaattaggaagtcgtctttctcaaaaaatgaggaaaattaaacaaaattctcgccccctcagttaacggggggataatccctaagttctcactggggagagagtattaccatattgtcgatttttccaatactattgaatttttttatcgaatttcatattacttagtattagtgttattttgatactattatactgaattattttcttgaaattttatttaatttttcactacattttaattactatcttcttttatcaaacatctccgtaatcacaaaatgaaggtcgaagttgattcattctctggttcaaaaatttatccaggtagaggtacccttttcgttagaggtgattctaaaattttcagattccaaaattcaaaatctgcttctttattccatcaaagaaagaatccaagaagaattgcttggactgttcttttcagaagacatcacaagaaaggtattactgaagaagttgcaaagaagagatcaagaaaagctgttaaacatcaaagagcaattgttggtgcttcattagatttaattaaacaaagaagatctttaaaacctgaacaaagaaaagctgatagatctcaagctttagctgctgcaaaggaaaagaagaaggctgataaagaaaagagaaaagctgaaaaggcaaaacaagttgcttctggtgctaaaatctcaaagcaacaatcaaagggtgctttccaaaaagttcatgcaacttcccgttaagttatctttaattaattcatgtctttgatatgtattttattatctaaatctatatctataaaaagaaatttttaaataatatactataactcttatcttacaaaaaaaaatctaatttacaaatatactctttctgtatttttcatctaatgtatttgttgtaacatgttttgtctctggtattaaataataaacaaatattgctccaatcattgtaataattgcaaataaactacctaatgctaatccaatttttgatgctaaaattggtattataagtgaaattgtaaaattgaaaatccatgcgcttgaaccacaaattgacattgctttaactttaatgtttgttgggaaaagttcacttattataactgatgcaatcggtccccatgttaaactgaaaactgatataaatagacatgatataattattaatgaaactgttacttgtaaactattacctaaaattgtaccacatattgtaaataatatcattaaaattgttaataatgttgatccactaattaataatactcttctttggaaaattgatataataaatattgataatcctgaaaatattaaattaacaattccaaatataaccggtactaaatatggtgtgttcaattcaacattttcaaatataattaatccataataaaagaaaaaattaatacctgtaaattgttggaatcctaacaaacatactccaataagtgttctaatgaaatatcttggtttaccataaagaattgatctactattattaaaattatccttttcattagttttaacaacaactctatttaaatcaaatgttttaactgttaaattggttaatctttcatcatcgatacttaaactacgaatctttcttaatgaatctttaactttatcaattggagacccattttttactaaccaattaggactctcaggtaaaagccaaattaatcctccgccaattgatgccaatactataccctgagataatggatattggaattgtgcattatcacttggataatactgtgttgctgaaaataatattgtaattgatccaacaacaattccaaatgtagtaaataattgattaaaacatgtgaatatccccctttgcttaataggtgtaatctcactgataaacatcggacatgtaatttgtgtaattccgattgctataccattgaaaattcttgctacaacaataactttccaattttcagaaagtagtataataaaattaccaataacataacttgccattgaaacaaatattgtgaatctcatacccattacaggtaatagtttatttacaattaatccactaatgaacccacctaaacaggaaatactaacaattgtaccctttgttacaggtttgaaagattttacaccattaacatttgaattaccataaattccagtaaatgatgataaatcaaccaatccaccaatggtgccaatatcatatccaaatatgaatccgcccattgatattaacattgaataacagacaagtggtacaaatgatccaacgctgtcttcatcactgcattcaattactttattattattatcatattcaactataccactattactacaatcattgactacattataatgtattgcttctgcattaatactactgactctatcatcttctattaccttttcagtaataattacaccttgggcatcattaatctgatgttcttgatgatcagttaatgatattaaatcatcatcatgactaatgtcattattactattaaaattacttttattagtctgttcaactacgcaactttctaaaggcacatcatcttgtttgatttcctccatttaaactagcaatgactggggactacgttgcaatagtggctttccctaggaaaacaaagcaaacatcgataaaaaaacttttttcagtatctttagtttgctttgctttgttctaattgttgccctgttggatagcagctttaacacaatggaagcaaatgttaaacttttatctacactatatacctactctctattctacaataaataactatatatgcaatacattccattatcgtcattgcgagagcatgtaatcaaccaggttgcagcaaccataaaagataatttctccccatgtatccttaacattacgttaaaatgtagtggctgggttttttttacactttccccattgagaaaccagcaaatttcgccgatgacgagccttcctctccgagtatatcaggctgatatccatgaactacctttccctaataccaaatgtacataagtagctaagcagagagtaaaataaactcaactaagcacagatttactgttactgacactaattacactaacctcaggggtatattcaaacgatacgttcgtctaacctaacctagatagagtaccaacaataaatgaaaaatgggaggctcgacaaatttaaaaaaattaagcgattgcctaattaggaaggtgtgcaggaaccagccttcacttgaacaatagccaacattatgtgtcttcaattactctaattatcgcatagtgaaagcccactttgacgattgtcaagctattcaaaagaatttataagtaggagatgtttccttgtatttttacaaaaccaaaactttaaagaaatgtacgaaagaaactttgctttttttgcttttttttcttgtttttttcttgtttccttcagacaaaacaaaacttttcaaccaacaaataaacaccaactaaaagtacctaaatcagttattcattcattactttgagacaaattccaactacttactttctttaaatatattattgataccaactattatacactcttttaaacttaacaaatagtcaataatccaactacacacaatcttttaaaaacaaatttcaaaaaatgaatttcaaatctttaatcacacttttatgtataatgcaagcttcaaatgctgctccacttccaatgccaatggcaatgccaaatgcagaaccagttatggtcactgttactgaagctcctgtcacaactgtcattccagtcgctgctgttcatatcggtaatgattatacttacacaactactttaacaactcttaatactgctcaaactacgtacaataatttagttggtaatgaaaatgttcaagcacaacctcaacaaacaactaatactaatttagttactgatgctttgacatcaccggctacacctgctccaactacgtcaactcaagaagaacaaactgaatcacaagcacctgaaacaaaaacttcaatctacactgatgacaaaggtgttgtccatgtttttgtcactgtaaatgaacatgtcaaggttgatcaaaatggtaatactatcactgtcgaatatcaaactccaactccagcacctgctcctgcaactactaatccaaatttagttcaaaataccacaccagctgcaactactgctgcaaccactaccgcagaaactaccaatgaaacaaccgctaatacttctgttgaatcaacaacatcttcaactgaaaaaacagaatcatcaacaaaatcatcaacatcatcaatatcatcaacagaatcatctacatcatctacaactccatcaactacttccacaactccaccaacaacttctacatcatcttctttattgactactagtttatcctcagaatttgcaacacaagataattttgttacaacttggtcaaatggtgaagttttctactctgtcttacctgaaagtttagttgaaccagaaaatgttgctccaattgttgctcttaccactactactctggcaaatactgcagaagcacaaacaactactgctgaattatcattagtttcatctgatagcaaattgttgttagctaccttaactgaaggtttaccaatggataaaaacattaaagtcacttttaacaatccagctactatttctgttactaatactcaatctgtttcaactccaattattgtctcatcatcaaccacttcatcatctacttctacaacctcatcttcatcatctactgctcaaggtaatgctgttcaaacatcaaccccagatggccttttaagtgatgattcatcagttgatgacacttcatctgtttcatctgcttctgcttctgcttctacttctgcttctgcttctgcaactgctgcaattgattcatctaaatacttaacaaagactccatactcccttgtttactctccatacaataatgatagtacttgtaagagttataccactgttttgtctgatttacaattaatccaatcaaagggtgttaaagaactaagagtttatggtaatgattgtaattatttaacaacggttttaccagttgctaaaaaattaggattaatgatcaatcaaggtttttggatctcatctgcaggtgctaattcaattgatgctgcagttgatgatttaatcaaatatattacatcaggtgcagcaagttacagttgggaaattttttcatatttcactgttggtaatgaagcaatcatcgcaaattattgttcagttgatgatttgatttcaaaaatttctcaagttagaggtaaattagaagctgcaggttataatggattaattacaacaagtgaaccacctgttacatttgaaaataatccacaattatgtacagaagcacaaattgattttgttggtattaatccacattcatactttgatacttattcatcagctgaaacttcaggtatttttgttaagggtcaaattgaacttgttaaacaatattgtggtgataaaaacattgttgtcacagaaactggttatccaaatggtggtattcaaaatggtaataatattccaagtcctgataatcaaagaattgcagtgcaatcaattttagatgttgccggtgtggatgttacaattttatcagcttttgaagatttatggaaaaatcctggtccttatggaattgaacaaaactttggtattattcaattacttcaataagtcaataataatttaaaacattaacatcttttctaaacatcacagcctgctcaataaaaatcaataacaaattcatttagatttcaattataaaagaccaactttctttataagaagctccttccactattaaaagggaatgaattataactttcattttcattttcgttttcaatttcattaattatatttacatttcacacgtattattatatttgtatattttataatttcattttatatatatattattaataactttcatttagtaaaattttaaaaatatatcaatttcaaaaagcattttttcatttattatatagtaaaggattattaataatatacactaatattagtaaaatgaattaaaattccactattttattaggaaagaattcatcaattaactctaaataataaggtttaagagtttcgatatcacatttagtatcagtttttgaatataaatcataaggattgaaagcttgaacacatttcaacatttcatgatctttttcactcattaaatatttataagcaccctctgagtgccaaggataaaacgagtgatatctaatcattgcaagaccttcaggtggtaaagttgtttgttccttggcaagatggtacatatattcatcatgaccccaacttaacataacattttccaaaccacattttggtgaataaataccatattttgttgaatataaaggattcttataatctggattttttttaaaataatcatgatagataatttttttagaatatctacaaccaactgggaaagtatcaccaacaacatcccattgaccttgagaatcaaaaaaatataataatttacctaaatcatgaattaatccaactaattgaaaccatcttggtttattgtcgtgccttattgcttcagctgtttgtaatgcatgatcaatttgagataattctgtatcaggatcagattcatctaataaattattaagtttaattaatgcgtcccaaacagtcatacgatctctaactttagttttaaaattaatccttgcttgataattatatgcaactgtttgcttttcgtgttgttccttataaaacagtttaactctatcaaatgcaagttcatattgtctatattgcctttgagttgatgcacgtaaaattgaagcttgtgtattatctttccaatcttcaacaattggtgaagcagattttgaaactgatgtatttatcttagatactgatgtgtttttttgagtttctgtgtttttatcattatcattatccttttctgtatcgttatcatctttcttctcaatattatctatattatcctgtaattctttcttattttgttcaagttgtttcagtttactcttcaataagtttaattcttgaatatcttcatcaattttttccaataggctagctcgatccatattctggaactttgaagaggtaccattatccttattactgtgcggtattttggatataccattagtactcataattcagcccctgttcccaaaagaaatgtccttctgttcacctgtctgaagactgaagatccagtggaaaaaaaataaaaaaataaaaaataaaaaaaataaaaaattaaaaaaataaaaaaaaaataaaaaatccgaaaattccgaagaaataaaaaaattcctactgaaaattccgacaatttctacttaacatgtgaaaaagactgtttataaaaataaaataaaaattaaattcttagcttcagggcccccagtaaaatttaataaattacaaatttaaattgttttcttttattttgatcttatcttattcacatgggtcaattaagcttcataacccaatgtctgcctccgcttcaaatgttcatgatgaaggtaataatacttccttgagatctggttcaaaatcagtccttacaacccgtcaattcaactgtttccgatttagatgtttcaatcagtaacaattcaacaactcaaaacaatagtgaatctgtaattgtcaatgaaagagagaaaaagaaacaaactttcattgttagaactatttggactttaattatgactttcggtttattagcaactttagctgctggtcaattctggactattattgcagttttattcattcaaataacagttttcagagaatgtattaatataacaactttaagagctaaattagaagatcttcattatacttatcctctcaattggtggtttttaataacaactatcttttatttagatggtagaagtttaattaaatattgtctcactaatttcgtattatctgattatacaagtgttgttgcaattaaacttgtaatgcatcataaatttatctcatattgtttctatgttatgggatttgttggatttgttgcatctttaagaaaaggttctcttagattccaatttgctcaattatgtataactcatatgactctattattggttattttacaaggtcattgtattgttagaaatattttacatggtatgttctggtttgttgtcccagctgggttagtcattatcaatgacatttttgcttatttatgtggtattacattcggtaaaactcaattaatctcaatctctccaaagaaaacagttgaaggtttcgttggggcttggatttgtacaactttatcatcaattttatttacttacattttcggtaatatcagttatttcacttgtccagtatctgataatatatatactaatttcttttcaattgttgaatgtgatccaaattcagttttcattaatcaaatttatagattaccaaatttcttagttgatattttacatactgattatttacaattgaaaccaatttatttccatacaatgatcatttcaatgtttgcatcattaattgctccatttggtggattctttgcctcaggtttgaaaagatctttcaaaattaaggattttggtgatacaattccaggtcatggtggtataactgatagaatggattgtcaatttttaatgggttcattctcatatctttattatgaaacttttatttcaactcataatgttaatgtcggtaatgtattacaatcaattattgttaatttaagttctgatgatataataattttagttaaaagtttaatcacctatttattcaaaattggtgcaattgatgatgaaactactcacaaaattttatcatcattataaatttaactttactatataatcatattcataatcatcagtactcacttctatcctttctttttcatcattattattcgtttaacattataatttgaaaataagttcttgtatgtatttagtaaaaaaacataaacataaaaattaatcatgaatcgtaaattcgaatatagacactgaaaaaatctaccacacgccctgtcttattcacattaatgacatgccttattctttcaaacgccaaaatgacggactattattcggaggatatattaccatgtgatgatgcggaaatatacgaatcatttccatcaattaccaaaacagaagtaataaatacagctctgagggaagaaccaattgaagaatttgaaaatgcagaattaattattgaagaacccgatattaataaaatgaaacaattaaatgaagaatttgaatcaaaactaaaactcgaactattaaacggaaatttaaggttgggtggtgatattcaaaccaatgataaagataccattcacaaaaatagagttttgagattcactttactcgagaaagaattacgttccttaatgaaggaattgaaaaatgatcaaaatgatctagagaaacctttattagataaagttgattctttgataaatgagattgatatctttaatagtagtaatttgcagaataaatatattgattattgggacaagaagctcggtgaagttaagttgaataatgttgaaaaggaacacgaaactgagcgtgaacaggataaagcttgacatctcacactccgacgacatattacaatctaacttggaacacagaataagtcaattagaatcacgtacagggtatcaaaatcccgatgattcacgcaacttcaaagctataattgatgacctatacaaacgagttaacatattattagacaacggtgggaaatttaaaaactatagatgaagaagtaacaaacttaatagaaaattgtgaattatttatacaaaactccaagaagattaagaatatcaatgaaattgtaccagttaaactgataaaaagttgaaactttctctactgataaagtcaaacaattacctgagtatgaaaacttattgaataatttaacattacgttttaattcattacaagatgtaattagaaatgcacaaaataccgtcacttttatgaatggattagatcaagaattcaaaaatattgaatcaaaattggataaatgggatgaaaaaataaataaacttgaatctgatcttattatagatgaacgaaatttccaattacttttagagaaaagtacatccaaataaaaatttataaaattgtacaaaaattatggaattaaactacatcatttagtgaaaatagaaaccacatcctgatcatgaactttatggttcaacccacatttttgtggtgcattaccaaactttgatgatgaaccccaaactaatgcatatttaaactgatctttaaaatctctatgaattgagttacagacatcttcgatcgatgaatcatgtctaacaaccattggacctttgaaatcaggcggacttcctcttcttttagtgtaaagtcttaataaatctaatctataccatatttcttcaacaacatcttgtatacctaaatctaattcacatgacataacaacagtatttggttctcttgcaattttatcaacttcctctaatgaaactgcatcaactttattataaacataaagacatggtgtataaactatgtgttgttcattaataacatcgattaaatcatcaactgttatattttcatctctaatcataacatctgcattatgtattttataatcttttaaaatattactaaccattctttcatcaatatattttggtggtgttagacaatttaatttgacaccacctgttttctttattttaatattcatatttggcttttccttatttaaacgaataccaattgcttctaattcatgttctaaatgttcacgttgttgatgtgatttagttgcatctaaaacaattaaaattaaatcagcagttttggctgttgaaacaacttgtctacctctacctctaccctcacttgcacctctgataataccaggtaaatcaacaatttgaatctctgcaccttcgtattcaagaacaccgggaactgatgttaatgttgtaaattcataacctgcaacttcagattttgtcttagtaacttttgataaaaatgatgatttaccaacagatggataaccaataagacaaacacgagcatcaccacttttttgaacttcaaatccttgtcccttacttgctcctgctcctccttcaggttcaagaagcattcttctatatttagctaatttacccttcaaaagacccaaatggtattctgtggctttattcttttgggttctagccatttcatcttgaatttctttgatcttaccaacaatatcaaccatcttgagttgtgttattgtataaggataagtaaaacaaaaaacaagaggtaattggaaatcgataataaaaaaaattcttcatgaaatgtcgattttcatgcatgctgaaaaattatacttagcttaatgtatcttgttctttctaacgttattctactatcaacaactacatacatttatataacatggcatcaagaattaaaccattgtaattggttaataataatatcaagagttgaaaacataaatgttttcagaccaatattatgttactcatctgaaatcaacatgtcaaacatctcaatattgaaggaattaaaattacaacttcatttcctccatcttgctggtaagtgatttcaacttcaatgacacactattactgtaattttcatctgataaatagagacgtaatctctcatcagtgctgtcaagtaatgaaacttgatcattagcttgcaatgtacaaagtctaatgagatattccaataatgaaagtggcgatggtttcaatggcttatgtttagcaggttcttttgctttaacttcaatcttttcaattaaatcagcagatttcgcatctgcatacgaatcatcgtcactactatctccattatccttctcttctccttcgtcctcctcagaatctgaacttgatacactttcttcataatcaccaaatgcaatccaatgatacatactatcatcatcaacagcctggtcaccttccaacacctgtaaattttttctcattttgaatacaagaacaggagttgctctatcttcaagttttaacaatttacctgatgcactaaagaataattttgaaactagttgaatattaaaagtgttttcacctgtctcctccccatcatcatgatatctatcatcattaaaatcttctataatcttcaagtcatacgagtatgtcatttccttatctggtttcctgtaaatttgaaatttacaacgtgcatatttctctctccatgtaattggattaccattgtttagttcactggagtgattgtaaaacacatcataaaatgtcaaagaaaactccggtccaactttaatatattgattctctttcacagagatgaacttttcattggattcaataaccatagtagttgctttaagtagtctaccaggtgaaacataatcttgaaaatgactgcccgatgacattgaatgtgtcattaataccatatttaggagtggaattaaattatctattttcttcaccaacccatctatcttagtttctataattctaatagtatcaatatataaagttttctcatttgcctttgaattaataatatctatatcacttgaaaactcattgatatcatccttcaaatagttacataattgtaatgtactttctaaattggagttaccccttgctgccattagataaatcatatcaattgtacacgttacagtttcgattttgtatttcaattgattttgttttgattcaagtctacgtttttgatgttcaggaacattttccactaatgttgacactgattttataacatatgttgacgctacttgcactccagatcggacagcaaatgtaactaacgtacttccagcctttgagagtaattgatccattggtgattggcaaccggagaagaaaattgtgcagttgacacgacaacacaaaaaagtatgttactttaaaacgggttttctaaattgttcatttatattatttacaagagattatatacaatgcaataaatagagttacagtaccagttcgatatgactatttcttgaccttctgactcttttttcctttccatttagcatttatctcttcagcagtttcgagtcggccccttttttcgtactttacatattctttaactgtttgaccaataccatcacctaaattgacatttatctttttagttggatcctcaaatggagtaatggtaaaatctttcataaaatcaagcataatactctttatgtgataatcattccataatccattaacacatgcatttgtgtcaaatgttctctttggtccagttgtccattttatcttctctggatcaaatccacaatcatataacaccaacggtatatcgtgagccattttatatgtaggtcttgacggatacttttcaatgtctaataattgttgaactatagttggatcttctaagttttgagcaactgtcaataaaacaccaaccatgcatctcacttgatgccataaaaatgcagtaccttttaaattaaacacaaaatgattatcttgattttcaattggatcaatttgtgccattgttatagttcttttaaagttagttatttgtttagatgcatcaattttacagaagtttctaaaatcattttctccaaggaaaaaacttgcagctttgttcatagcttcgatgtttaaattttcaccattgaaaatatacttataatgtctgaaagtacaatcaaatctggcatcaaaatttgttggtggtcttaaacagatactatgcattctgatatcatttggtagagattgattgagtgatttaatgtaatctatttctttttcatcattttttggatcttttaattcttcctctgttaagttggatctaaccacaagtgaaatcacttgattcatagcactaacacctctatccgttcttccacatctgctaaattcgcaatcttgttgctcaagtgaaccaatgagtttaactttaaataatgcctccattatcttttcttcaactgttggaagttcagttggttctccctgtagtgcaagaccttgatagttccatcctaaataagaaaaccttagtgctatttttcttttgctgtatttactgaaatcaaatgtcttttgcttttttcgtttagggagagttatttcaattgtattatttatgcttttattatttgatatactcttatcatcaatttttgttccttctaattcatgaattctagctaaaagctccttcttggaccatttggaatagtcgatagattcagaattattggacatttttcttatcaaaactttctcaaatgttagcctaggtttaaagttaattaatcgcttgtaaacaagcataaaaatattatttcaagagagagtattaaaataaagaaaaaaactttcgttgataaaccagctgaacatcaaaagaatttaaaatctcaaattttttacaatgctgtttcccaaaaaggtaatttttcatcaacacttttaaaaatatttttttctgaaacttttttcttttcaatagtataaaaaccctttttagagtattgactaaaacaatgaagaaggaagtagcgtctgtatcttgggacgatctgtcatatcaaattgaaccatgggttaaaaatgcaatgattacattaggttttacctcaatgacaccagttcaagcatcaacaattccattattatctcaacataaggatgttgtggtggaagccgttactggttcaggtaaaacattagcgtatgtggttcctgttttagaaaaagttattaaactacttaaagaatcagagttaaagaaaggtcaatttggcgcattagttgttgcaccaactagagaattagctaatcaaatcaacacagttttcaactcagtaattgaattacaaccggaagaagagaagagaatcggcacacaattattagtcggttctatgcaaaatgttagagaagatttagaattgtttcataaaactaaaccacaaattctaattggtacacccggtagaataatagacttttttctcaagtaactctattaaaactaataaatgtgaaataatgattcttgatgaagctgataaactattagatgatggtttcataaatgatacacaatccattgtaagatatttaccatcacaaagaagaaccggtcttttctctgcgactatttcagctgttggttccaaaatctttaaagctggtatgaccaatccagttaaaattacagttaaatctgcttcattagctgcaaattcagcaccagaaagcttgaacttatcatatatggttgttgatccagaactcaagttgaaaatattatatcaattactacttaagtttagatataaaaaagttatagtatatttcccaactaattttgctgttacccatttttttaactttttcatggaattagttaaaaaatctaatacaccagaatcagaaactgttaatatttactcattgcatgggaagttagaagcaaaacctagaatgaaaactttgaatacatttgcagaggaatcacctttcaaatctgttttatttacaactgatgttgcagctagaggtatagatattccatgatgtagatttagtcattcaattagatccacctacagagcctgatgttttcttacatagatgtggtagaacaggacgtgctaataaaattggtagtgcaataacgatgattagtgaaggtagagaagaggaatatataaatttcttaaatgttaaaaatatagatcttaaactacaggaaactcctaaattaaatgaagaacttgtcaagaattttgatgaaaagatgagaagctggttactggaagatagagcacgttatgatcatgcagttagatgttatgttggttatactagatattactcaaagcatgttgcttcttctatttttagattagcagaattaaattatttgaaattagcaaaacttcatggtcttacaagataccctaaaatgccagagaataaatatattaaagattttccaactgatggatggtttgatgatagtattgactttgacgcttataaatataaagatgaagtaaaggaggcagccagattggaggagctaaagactgagaaaagaagaaaggaaagaaagcaaaaagctttactgaagaaagaacttaaggaaaagaactcagcatggagtaaaaaagttgatactaaagaaaataagttagaaagacgtgaaaagatgtctaaaagaagagacgcagttgaagctgaacttcaaaaacagaaagaagcagatggtgttgacgatagtgattctgacgttgaagttgattggaaagatttagttagagctaataaaaagcaaaagaaacaacctgcacaaactcaaggatttttcgatgatctataaatagtctgtataaaatttaaacactaatagagaaatgatttaaaggtaccatgtttattgttcaagaatgtcttttagttgaatattcttgccaactttcaaagcttccttccagaactttgataaatgacgagaaccctgaatcgcaagcaatcattacaattttagatccaggtttggcattttgtgcaattctaacagcagcaacggcattgatactactacttgaaccaacaaacagaccatcattagcacttaaatatctagccattttcaaagcttcctcatcagtcactcgtatagaatcatcaatacaatgttcaccctggaaaaaattatgagtaactctattcaatccaatcccttcaataagtgtatcaacttgatgtctacgtcgtgtaccttccttttcaacttgatcatacatcacaccatatttaactctgttaaacattcctgaaccttgaggatctgcaagaaaaacttttattttatcagagacggaattttaaatatcttgaacaaccagcaattgtaccgcccgtacctgaacctgtaacaaaataatcaatatcacggttcatttgttcccaaatttcaggaccagtagttgcataatgaattctccaattattatcattttcaaattgatctgcaaaaacaccattagattctgttgatttatcattttttaatgctaatgcacctttccttgcagcattaacatattgattaggatcaacaattgatgcaggtttaactttttcaatctcagctccataactttctaaaagttgtaacttttcattagatgtatcatcaggcaaacaaatatgtgcagtgtaacctaatgcattacatagcattgcaaatgaaataccagttgaaccagatgtaccttcgaagagaacatcatttctaccaggtacgagttcacccgtttcttcaaaatgtctaataacagataatgcaactctatccttagcagaaccacctgggttcgcaagttctagtttagcatagatttcacagccagtttcatttgataatgactgtattttaactaatggagtgtttccaattaattctgtaatattatctttccttttcggagcctgatctttcaatgacttatattcagcatttttcgatataagtttgtaagttatatatgaacttgagaacgctataattacagcatataaggctgtcttaacagatgaagacatgtctctataagtaactcacttgttaacaccgattactccctatataatgagaaatggagtggaaattgtcgcaacgaagtttccatgatcgcatgttaaaaaatattggcatttttcatcacagtgaaactttaaaagttcttcattgaacttgatgtgtttacattgaaagaataagttcaaacagtttatatagtaaagatggaagatatacaaaacattgcagacaatgtttacaaaggattaatgaaaaatgatattgtaataatgtttattgcatttacaaacaaatacattttgaatccattaacaaagacggaattcacatcacatttaattgcgtcaaaaccttcaagatttattacttgtttattgatttatttaggaatattacttgcgatttatgaaactatactgcatcttggtgttgcacttaatttatggaagaatccagctgatgaagtcttcaaggaaatccctgttcattgtgcacatgtttatgtttcaatcaatttattaagtaaagaaaaagttgatgaagaaactgacgatgagaaagttaaagctgataaacgtgattatttactcaaatatccaattgtttatcattttgaattcagtcctgaagaatatgcacatgaagaatacggtacagatttgaaattcattaaaggtaaagttcataattggtttacaacctctgaagtttatcatcataacaaaaaacatattcaaaatcccgttactgttgatgatttgagtttttatagtaagaaagggaaaaaactagttggtgatgatgaatatttatgtgatttagatgttggaactggtgacactatcttttgtatcatagaatactaaattgaataattgatgtgtaaataaaattaacaattatcttctatctctgtaactgtgagatcttctctctggatcatactctcttgaactcctgtatccttcagatctgtatggatgtctttctgaatttttactttcatatctattagttgagtgtctatgtctggaatttcctgtatatgaagaatctcttgatctataagatgatgtagttctttcatgtaaatcaccatctctttcctttctatctttctttacgttcttcatcaatttcttttgtttctctagttgttcttgtcgttgtaactctttcaatttaattttgtacaatggatcagattttgacattttttcaagttctgcatacttatccactgttcctgtaccaatagctgtatcctttattcggttccgtcactcttcttttcaaggaccatgttttattattttatccatacgtgaagatttatctttatttttatttaatgatgataagttatcaattttacgtttacccaataaaacatcttcatcaaaaccttcatcttttccatttccaatatttggagaattatacatccaacttgttttaacgtctttcttttcacttggttcattgagacttttagctagtgataataattcatttttttcacttatttcctttaattttgcattatgttgttgtgattttttatattcatttagtacttcacgttccttttcccaaactttttctctgtttttgataagtttaggattccaagatttcttaagattcaagtccgaaggcatattaatggtgaatgaagtaaccaatcgatgatgtttctttagtaaattgtgtaagaaagttttaaaaaaaagaaaaaaaaacttataatgacgcaaaggaaaaggaatctcttactatattgataaattagaattacgatttcaaagtggtatataattaacaaattaaagaaatgcattactaaaagaatatactatataaagaagaatgtgatgtgtgttaaaataaagactttaaatactaattgtactatatgtcaatatttaaactcacatatacatacacaagcatttaaaagaaggtaactttctgaaatctcatactgtagcatccaaaagataataggcatagatatagatataatacttagaaaccatggattttaatatttttctttttaacacctaaagcttcaaccataaattccataacttttaaacgttgatcaccttgtaattgaataacttcacctaattcttcatctttaacaatattaccattacaggcaaaatcttttttaataacttttaaaattttctttaaatcatattcatcaggtaaaccttgaacagttgttaaagtttttctaccatttctttgttgaatacgaatatggatataattagttaattcagtttcatcatcaccagtgtcggcaaaaggatcaaaggattttaagttttcgatattactcatataatagaatcgagtggtatataaagtatcagttaattaattgaaccttgaagaaaagaaaagagaagagaaagagaaagagaaaacagaaagagtacaacctattgagatatcccataataacataataatatcgtaataccaaagtaataccctctccttccctctgtgaaaagtgaaaattttgaaaaatggaaaaaaaatcagtgaaaatgacgaaatcgtgaaaataatgaaaatgatgaaatttccgaggggttcattggatacttccaaatttccgagcttagtggcgctcaatcggacggggaaggaggctctggtggtagaattgttgttagttgattgtttggatgtatttatataggaggatacttaaggtggtagaaggtagacttactgttgccaattgaccatagcactatgtttggatctagtagacactgtctcagacattcagtcggcaattaaaaaagcctgtaatacagatgattcagcttcaaagaggaaacatgttagagcttgtatactttacacttgggatcataaatcttcaaaagaattttgggaatcactcaaagttttaccattaaaagattcagatattcaattatttaaagccttaattttaattcataaagttttacaagaaggtcataattcttgtttagttggtggttttacaaatatgaattggatttcaaatttagatactttacgtacaatggatagaagatatcaagttttaatacctgaatatgttaattatcttttaaaaaaattaagatttcatcataatcatagaggttttaatggtacttttgaatatgaggaatatgtttcattaagtactgtatctgatccaaatgaaggttatgatgcaattattgatttattatcattacaagattctttagatactttcggtaaagatattttttctgcaattagaaataatccttcagaggcaattattagtgctttagttccaattgttgctgaatcttatggtatttacaaattcttaatttcaatgcttagagcaatgtataaaatgtcagattctattgatgttttagaacctttaaaatcacaatttaatgatcaacatgttagattatatgatttttattctcaatgttcaatgattaaatatttaacaactttaattacaattccaaaattacctttcgatgctccaaatttaattatcaagtgataatgataataatgataataatattgatgatgttaatttacctccattaagagaacaaaaaacctgctgcaactaatttttcatcttcaagaactgaaactcctcaatctgtgagaccaatcacttctcaaccaacaggtgctgttacaaatgcttttaatcaacaacaacatcaagttcgaattagaagcaacaacaattagaacaacagcgtcaattggaacttcaacagcaacaacagcaacaattacaacaacaacaatattgggaagagcaacaaagaaagcaaatggaagctcaacaattggctcaacaacaattattattagaacaaactcaaagacatgctcaaggtaaagttgctgaattagagagagatattttaactttaaaaggacaatatgataatgatcaattgatgttacaaagttatgatcaaaaagttcaagctttagaagcagaattatcaacaactacacaaactgctcaacaacaattagcttcaaaggaagaacaattaaactatttacaagaacaagttgattattggaaatctaaatatgaatcattagcaaaattatattcacaattaagaactgaacatttgaatctattagcaaaatccaaaaaaattgaacaaaaggcagcttcagctcaagaagcaattgataaacgtgaaaaactagaaagagatatgaaagctaaaaatattgaattagcagatttgattaaagaaagagatagagctaagttagaattagaaagattaaaaaatggtactaaaacagatttacaaactttacaacttgaaaaggatagtttagaagaaaaattagctacattagatagagctcaatctgctaatttaagtgctatttttcacacaacataataaagaaattgaagaattacaaaataaattaaacaatgttacacttaatgcaccaagtgatgaaaaattaaaggaattacaggaattattagaagaaaaagatatggaaattgaaatgatgcaacaaacaatggatgaaactatcaaagatttagttaaagagcaaaaggagaaacatgcaaataaggaaaatcaaatgaattcaaattctgatagattttataatttaattgatgcaattttaaaatctggtataagtagaattcaagatgccgtttttgagttagattctcctatgcaaggtggtaatttaaactcatcgcctgaatatgtttccacaattattgaaaaatcttctggtttatcaacagaatttgcattaagttttaattctttcttagttgatggtattaatggtgatgaagcaacagttattgatagtattactaattttactacatctattggtgatattttacttaatactaaaggattaactagattaacaaaatctgatgatttccaagatgacttaattgatactgcaagagatgttgctgaaatgtctgaagtttatttagaatcattatttcataaaaatatttcatctttaaatattgaagataaaactgatgtggtaattaatggtaatattgatttacaagaaattttacaaacattattcacaattaattgaatcattgaaaactccaagttctaaaattaatcttgatagaattactggtgaattaagtgatgttgttgataaagaaatggcaaatgcatcaaaagttattgaacaagcttcaactcatttaatttcattattgaatcaaccttttgatccatcaatttcagcaattgatattgaagttaataaatcaattttagcatctgcatctgcaattatttcagctattaaatatttaattgaagcatcaattgaatcgcaacaagaaattgttaataatggtagaggatcgaattcaagaacatcattttataagaaaaataataaatggactgaaggtttaatatctgcagcaaaatcaattgcatatgcaacaaatacattaattagaattgctgatggtgttttacaaaataaacattcaaatgaagaattagttgttgcatcaagagaagttgcagcatcaactgctcaacttgtatcggctgcaagagttaaatctcaattcatgtctaaaactcaagataaattagaagatgcatcaaagaaagttaatctcgcttgtaaacaattagttaatcaagttaaccaattaattacaaataagaatgaattagatgagattgattatagtaaactttcaattcatgaaaataaaactgttgaaatggaacaacaagttgaaattttaaaacttgaaaatgaattatcttcagctagaaagagattaggagaaataagaaagtttagttataaagatgatgatagtgatgaagaatagattgatttcggattattgattgatttgtggtatatctaatatactagtgtattttgtagtgaaaaaaaatgtttacttttaagaaaattatttaaaaagtagaattactatgacttgtgagtagtgatagtaaaataaatggtaattgctgaatcgatttggaatttaattggatatattatatatagtaaagtgttataaagataaaactcaagatcaaactagtgttttcttttgtatcttgctcttttattcgtaaaccaaactcggacttggctgggagtcattttacacttctcagctatcagttttctttcatttgagtttgggaaacgctttatatcaaataaagcatttaacattttttggttttctttggaaagcagtcttcttttacttgtggaaaagttatcggatgcgttgggatttgcggagaaaacaattgtttggggtacttttttgtttgattctgatgggatttcctgaaaaaattctgtgtattctgtgtattctggttcgggtgccttgggtatcgcagaagtttcaaactgtaacaaggatgagtcaattaagttttcttgtgtgtggatattaaaattatcaaattcaaaatctgagaggttgtatgataagttgcctatgtctgattgattgatagaatcaaataacaaatctgtgttctcccaagaagtgcattctggtgagttttggaagtttgaaatgcctaagtagtctgttttcaagacgatgtagttcaaaacatactctttgtatttggaaaatagtacatcaatatctgtatttgataaattattcttcagtagtaccattgcttctttctcaaaatttttttggcatacatctagcaaactctgaattcggggatgtaagctttttggcagctcttccattagtgataactttggaaatgaacatttgactttactaatgtccgtcttttttctgtactcgtttgttagactacaaatactaagtaatggaaaaattgtagtttctaagttggttccccctgtatgctcctccattttatattaaagtgttcagtgaaatatataatgaaacgggtttttgtgttaaataaagaacgactgttctgcaaaggggggcctaacaagcgataaaatcagactttaaatatttttttggtgcaaaaaaattggctttaaaacttgtttcaggtctgaacctgtttcataatttttaggaattgatgatataatacagtcagaaaatttgtttttcgattgagtctccgattcatataattgcatgtaatatgtacttgcgaaagataatttgagcgttaccacatgattaggtccagaaaaaagggcaaatatccccatctcagttgatttatttttatctattttattaactcctgtttgccaactatatgcttagtcacatgtacacattcagaatcccagaagaagtaaatgatgcagtagatgctgctgtacgtcatgatgataaagaaactgaagaaaccgaagaaacgacttatatacctttaaaaactattgagttcgttgatatagtcacaccgggagagggccttaacaacaagaaattcaaggaaataaaacgtccaagagttgaaaaatataaaagaaagccaagaaatatgtttatgatatttcggggtcttacgaaaaatctaattagagataagctgcctaatttgacatttgagcagaagtcaaaagtagtttcaaatgtaagtgttttttttttacctcttttttgtgaagataatactaacattaatatttgaattataaatagatatggaaaaagagaagccactatcttgaacactacgtgaaatatctttctactcaagaggctatatttcaagaagaggaggtattcaagatgctcaatactccagtattacagaaacaaaagaaaaaagagatgaaaagagaaaagaagaactcacgtggcttcaaagtaaaaaaggttaagtttgcaaataatgatacgaatagcaaacaattcaaacaatacaaatatggaaaacataaaaatcaaaagcttgacatcaatgaaaaaactagagttgaagatttatatcttaaaacatcatgaactactaactgctcttcaaataacgcaaaagaggttcaaaaacctttttttccacgttggaagcccacaatgtatccatatgttcataaccatctattcctattacctcaatttcacaactcaaattatccaatgttttgtcgatatcaattaacatatcactttttccgtatatcaataaacatgaagttgatattgtttgagtggggaaaggagcaactctgtttgttttttttgaagtcccactaaaatataccaaattggatcctgatgaaccaccttcatcaaacatttggaatcttttattatcaattatttgaaaccaatgagcaacagatttaactgaagatggtgaaaacatgtgtgggtatcctatctttttttgtgaagtttcaatatttccagaactccagttgaataaaaacactagtgatttatcaacaaccgtttgatataaattcggtcccattaacttttgccagaaaaccacagaaggcaataaagctcttttcccaaatattctatataataaatttggtgctgaacttatcaaaaaagaacaaatcggattatttaagcccttaggaatcattgccggggataagccaataaatacatttattttctgatttagttcatgattcaatgaaagtgcagccaaacattgggcagagccttgactaaaacctatgtaacttaatgattttttatttgtaactttaagaacataatctattgtatttggtatatcaaacatagcaaattcatccaatgagtaattccagaattttttgtctttagatgataatataagatgttttcttgaatatttatttcctctgttgtttcccaaccatacatcgtaaccttgttcaaccaaaatgaaaggtaaacatttttctttagtttcccccaatacaaataactcactgttagtcaataaaccgtgatgcatatatatcactttttcattggttgggattcttccagatggtgggagtattctatgtatggacagtaagtaaccatcttttgtttgtacgacgtgttcatgaactttgaaaccatgtgcatgcactatatctactatgtcattagcatttacaatcttttgttccaaactatctttctcatcatcaagttcaccctcaactggtttatctgatacagttgatgaagagaattttctaaacttcgtcgttatgttgtcagggttgttgaaagtttcctgtgcatttgctaagtactcttcaacacccaagtaatgaataatcagcatcgggaattgaaccatcaatgccaaaagattcaataaaatttcaaccatcctcatagtaataatcgtttacttcttgtccaggcagattgataaatgatatggcttaactacaaatttagaaagcaatattacatacaggaaaagggaaacctcagaatcatgtcaaatctcaaattttgaattttcatgcaatctcaattggccgatatttggtatatgtaactgtctttcaagcgttcattacataaatcgattgcttgtttagataatagtatattgagtctctatatacatagatatatatatgtaaataaaaaactacaagtaatgctttttaaagttgaaattaataatatacttatcaacaggaacttcaaagttggtgtaatgcttttcaacaatagcagaaagttttgtaaatgtagaaatgtatagttgagataaactatacatacaattgttataaagttctttttcaatttgtttaccaattgtagttgtgtattcattttccttggatggatcggttttattataacaacgaccagctaaaatcatatttaaatcatttgcaatattggtaatatcttgtttaaaggtatctcccttaaatggagacatcatagttttgatgttttcagctgcatagttttcatagtttgaagggttgccaccattagaaatcaaattttcaagatcatcaaccaatctcataatattaccaatatggtattgtttagcaaaaaatgaaccaaacaatttcagctcttgatctcttaaatcatctattgatttgctcaaatcttttggatattctttcaaatgtttgacttcttcatgtagccacttataatttacccataatgtaagatgcttttgaatagagattttaatatcaccttcatcgttatcaacttcatgttcattcaaggaaacttccaattttgcattttcaacacctttattcaatgcagctttcaaatttccaaacatcatgtaatagttaccatagtttttctcatcagaaccaaattcggccacattcaccaaatctaaagaatcaataattccttgtatcttgaaaaagaaaactgggtatgcttttgtactattggataccatacaatgaatctcattgctaaatatatcatgaatttgaacatcgacctctttaatccataatgagttaattttcgaatcaagttttgagaaactaccatataaatactcctgtgcggttggtgctaataacttaaaatatttattcagtaatgataagagtcctggcgtcaagatcatattatttttagatatcgatgacacaatttttagagttgcaccgaaagctggatcaaatatttgtctcatcaattcatatatatcatcagcaacttcacgatcactttcaacatctttggctaaaaagttagttgtttgaaggaatgattcacatctttcttgtaatgattttttcatcaaactttgataagtatactcatttgaagatgataatacaaacaaatttttcattaattcttgttcaatagcagcaatatttgtgagctgtgagaaaaatttatcaacatgtttaattaataacttttgatcttgaaatgtgctatttggattggctttgggtgtatctttagtaaataagttaactctatttgaaccaaaatctttagaagatctgaatttcatatagtcttcatcaataatagtaacaggctctgctaagaaagcaaacgaattggataataatagtgaaacctctgtacttaaatccttcataatgaaggttattaaattttcaaaaaatggtttgaaggcattgataaaagaatttaaaatgtattgataatcctcaactgacgtgtttttaacaaataagattagaccactgatagtaagtaagtatgaagatttttctaaaaatgcagttttcaaaaattcattatcaaagtttgcatagtttgtttgtgctaatttggaagataaacttagtgatacggattcaaataacttagaggaagattttttcaaatttgtgataaacttgttttttgcaccttcaaatgtatgttttttctcttgcaatgctttcatctttgagatttgatagttatctgtactggcattttcttctttgctatcatcattttgatcactgattttcaataaagcattatatagttcatacaaagttttctccagttcagaattctggtaaccaaatttaatatcaggtgagataattttttgtagcttaaaatcaggaatttcaactgaatgtacaatttcattcaattcattcattagtaatttttcatttgttgcttcaacttgtaacccttgaccttgttcctcaataaaatccacgtcatctttaaaagtggacaactcaataccaaataaagacaatattggatcaatatgatcacaactattaaatgcattggaaattgtggttctcaaagctgatgtaacattagttgtttcagttaaagttttaatcttagaatattgcaacttatctagttctttcaatatcttagcctctatagcgctagaatcatcatttactgggtcataaccaatttcttcaaaaatttccaaaaagtcgatatcatcatctttaatttctgaaacacgagagaatgctcttgatcttgcatgtggccttccagataatccatctgactcaacttctaatgcatttaaatgatcctttggagttaaaagttgatcgagttcggatgatagtaaattattgttggttaaagtattacgatagttattaatctcgtcgtcactttcaagtgttgttgtgattgtaggtgcattcaatggcttagattgttcaacaattgtctctttagctcttggtttaggtaaattcaaactgagtggcgctgttttttcttcaccattacttgcataacccttggtataactatccagatcactacttactgcactttcaaatgattgattcatagtttgaaattttgtttcatcaccatactcaaaactcatttgacttggtgtttcagatagagctgcagatggagcaccacgtttagctattcccgcaatttgtggtggtatgacatgttgagccaatagttctgcctctttttgcttttgttgctctttcaataactgttgtctctctaattctaactgctcttgttgtcttaacaattcagcttcttcttgttttcttttctcttcttcctcctgttttttcaaattggctaatctttgttcttctagttgcttctttctaatttcctcttcttctagtagtttttgcttcttcgcatgttcttcatattcttgccttcttctttgtaactcatcttccgctctttttttcaatgctaattctcttctagcttttaaagcttctgcttttttctcttcttcctcttttatcttgtcttcatcatatttttttctttcagcatctaatctggctttattatcactttctgagcttgcaatatttttagcattagcggcaccagcaagcgctgcccctgtagatgccaatgcagagctcgcaatagcaccgcctgttaatgccgccgctgttgaatttagtgctgcagatgctgcaggcgttaccgatttactaccaaatgttgaacctgttattggtgatgggcttcctagagattgtctaaatgttgttatatctggagagtctgatttagtaggtgaacgttgaggattggtgaatgatttttgaacagttctatctgtagccattggattatttggttgacttggttgtttcatatttaattggggcacgttattcatcctggtattgtcattaaagacatgtactggctttttatttttagaattactatctttttgaaaagattcgtatacttcttctaaatggaaatattcaattgaacaattaattaattcaggaattttaccattattatatctcatatattgttcaatgacagtccttgtccaaattcttctttccttaggagtatgtacttcccaataatataatttacccaatttgaatatcagacctgtttgaatctggtcatccaattcaattgattttaattcatcaaaatcccaacttctaccaatttggaaaatgttagtagatgaaactttagccttatgtagcatcattctaccagatgatttctttgataaaattaaatatctttcctttttgttagaaagtggactattcggtggaggccttgaacttggacttcgtgaatcttcaacaattggaacatgtgaaatatattcttcaatatctctattttgaaataagtcatgtctaattttacgcatatctacttcaaattgtctagccaaatccattgaattcataggtctatgacctggttcaaaagcattctttcttggaacagaaacgttagaactgaaattggagttgaaactagaattgggtgtcccatttctattcgctgttgtggaggtgtattgtgatgatgaagtcaatggtggcgtacgctgattcaatggttgtgcaaatggatgtttactgtacgacataatgccttgatcccgttactttacacttctgtacaaaatgtaaactccaaatgaatccaaaaagagatcatcctgggtttgatgttgatgttgtgattttaaatttccccagcgcactcaataaagtcaatattaaacgagacttgatttgtgtatctacagctaatggattttcatatctatatcagataatatcaagcatagtagataataatattatgcgttgtagatcaactactgtctatgtaaaaaagtctatagatctatttataaaaggggggggacttattgattttcagcatcatttgattcctcatttgaatcctcatttgaatctttgtttgaagtttccttttcacgagtttcttcaagctttttcaaagatattttaatacgttcatctgcatcagttactttatatcgaccgtcatcttcatcaataacttctaattcgagacctgaatttaaaattttattataatctttatgttttatctcccaatctaattgagtaccacaaagccaggtaattgcttgatcacaatatcctaataattctatatcaaattcacaatgattaattggatctctattaatcaatatttgtggtatgtgatcaggaaccctattaacaatctcactaactggtgctactttcagtgatgtgccaatagtaattaataaatcacaattcctaacatcttctttaattgttgaatgatatctatcaggtaaattttcgccaaagaaagtgatatcaggtttcatgacaccaaatgaattaatagtttcaaattttgaaccaaaattacctaaaccttcatcttcaattttttcaaattttctaataagattttttctttcattttcacagaatggacaatatgctatttttttattcattaaattaggatacagcgtttcaccgggtattttatatttacaactaacacaacttgccgttgcaaaagatccatgacattgaactaatttttcaggtaatattcctacattaccttctaaattatcaatattttgagtgtaatttcttaataatttccccttatcttgtaataactttataaaagcatgtaatggagtaaatgaatgttcaggtggtaatatcatatgagcaattgaataaaaagttgttggatcacgcttgaataattctaaactgaaaacatcttgagggtcgtctaaacctaaagttctcatctttgaataaaaaccttttgaagatctaaaatctggtatgcctaaagaagtggagatacctgcccctgttaaaaccaatatattttttgcattaagtaaagcatttttcaaatgttcaattttatggaaatctgataatttcgttcttaatcttgagactttattaattgaattttgcaaatgtgatattgaactatttaaaaaatcttggaaaggtaatgctaacaaagtttctagtttaactcgaggttcgaatcctaataatttagcagaagctaaaatagcttcaggttgtgatccgtgacctaggaaaagatcaatatatttgtcatgaccttcactctttaaaaatgcacgtgcttttgaacgtaactttttagtaactttaagatcttttaaaggtggtagatcaattttaccagagtaaaaatcgaagtctatttcatcctttggatcaacatcatcaaattgaaattcttcaatactgctatcatcatcactatcactattattttcatactgatcattattataatttcggttattgggcacatcattatatgaaggttgggtaggtttggggctggaatttgcagagcttgatgaggaacttgaactatcaattatttccacaggttgactaacatcattctgtatacttaaaccttcctcagggttaatgctaggagatgttttctgtttctttgaattattctcatcttcactatctccttcattatcactctcgctgctacttgtttcagattcacttccaataatttcatcatacctgttagatttccctttcagtatattatttgccccatctattccgataacaacaatatttcttgacctttttgtcccagacatggtcacctaagtatatataatgtacggaaatggaagcttaaatttataataaaaagcaacgatcggatacattgagagtaatcaaataaacatttaagctgtagtgataatttaaattttttaattcgcaacatgaaaaaaaactcgacatgttagtttagtatcacaactaattatattttcattccttatactaacagacaatggcagttagacacagaccagcggttccaccacttcctcgtcttcgtgtgaaaaacagtgtagctaaacaagaagctaatccatgtttagttattatgtcacaaatgcttaattgttgggcatccaatggtgaaggtaatattgcatgtaaaggtttagaaactgacttaaaggcatgtatggcaaagggtattaaggttgcaccacctccaaaacctacattaaattaccatgctgctagattacttcctaagattcataaacaagaaaagaaataaagaattataaaataaaacaaattttaattatcttcaaaaattaattaatggatttttttctgtacatatcataacgaaaacttatataaaaaatacaccctgtataacacaaaatagaaatacacttaacttattattgagcctgtactatatgttgcattcaatgcaatactgtgcagcttcatcgaaacttgaaatacttagtaacctgtaaagtcgcgtctatgattaagtaattggtgattacgtaagtactggattttgtaatggtagcagacttaatagtacgttatcgatatagaatttaaaatttagaatttattatagttaaattaattagttagataagatattaaatagtaggtatcagaaataaaaatatatagtgattagaggtaataagtaacacataaaacaagcttggtaataataataaaacatttcataacaaaaagaatttcaataatcataaacgttaaagaaataaaaaggggatcatcataattaagaaaatgttaaaaaagagtattaaattgaattaaaattaattttgtgacatagtgcaacgaattgaaaatattagacttgaaatatgcgttaattatatttgacattaaatttgattagattagatagtaatgacattaggtttaattattttttatttgatgttttaatttgaaatgaatctaaatttaaacgacggcaatgtaatcttcatcaactggttctttgtaacctgctggcattcttaaccaagctggctcattgattggtaagtaagatgaagcagttgtttgcataccatcatagaatgcatagaatgcacaaattagaagtgaatgaaacagaaaataccagagacaactctaacagcaccatgattaccggaaattagcaatggttaataataacataaagaaccatttacagaaggttaaaacaaataatgggatagttgatttccaagttgacatgaaaaggaagaaatcaaagacagtccaagctgaaaggaataaagtcatagcagaactataattagttgttgaaggataagctgagataacaccaaataaatctgatgcagcagcaccatatgacataatgaaaccaccataacataataataaagttgaaccaaataagttatcatcaacaatagcccaaatacccataataacttggattaaaccattaccaaagaagaacataccagttaagatagcaggagattggacacctctagcatgacaaaggactaaacctaaaacgaaaagagagactgcaataaatgctaaaccaattgaacatgatgcaggatatggtctccattcatttgatcttttataccaagagtttcttaaaagaccagttcttggtggtaaaacggtatagacgtattttttttcaaagacttgttcagacattatttaatttgtgagattgtttgttactaaaagaaataaattaaagaaaataatagaatagaaagaagtgaaaagatcaagcacgagataacaacttataaaggaatatttgatctttttatagttgaacgagtggagtggtaacaaagtgatcaatcattccaatttgattaaattaacgcaaacgttatacagaaagggcaacgaatgactaaaatcattgttgaaatattgcctcttgtagtaatttaatgaagaaagtttactaatacagtttataatattataatatttggtaatgtttcatataccgtccggtgtttccggctatagaatctattagaaaaattatataatatacgtgacgagcctacgtcaaaacggttgaaatttttcaggacatctccttttcgccaagtgattcaacaatgttatagatcatattagttatatagagggtgtacatggactactaggttatgagttatagactgatatcaagatatgatgaaatgagttactgtcactgttcatgtatactcactatgaagataaccctaaccggtactacatagtttcggaattgaatggaatggaaatcagtcgactccgatccgaacggaaacgtcggatagttcggtattatttaaaataaatttattatgagagaatttatttttataaatttttttggcggctcattttattgtgccttttccatcacattctacaccattccaatccattgatttttactactttgactccagtttttcttctaatgaccactaaactttgtatataaattatacataaactgcataaatcaattgagtgtatactgaaaaaataaatcagctacatcaatatgcaaaataccccttaaattgcgaatctgatgatgttctaaatttttttaagtctgaaaatcgtacaatttttaatattttcttaatagggaaaattaattattttccgctcttttttttcaaaattatgtcatattacgtaattgatttgcttatgtaatattcacgtgactaaatattggcgcaaattctgacactatgcatgaatttattcaaaaattttcatgaatttttttgattccaaattggatattcattataaaaatatcaaattaaaacatctacttctcatcaacgatgctttctcgtatagtgaaatcacattctttgataagaaactattcatcctcaccaataaaacttgggaaaacttttggtgaacttgagaacagctccccttccataatagattcaatcacaactggtaaactcaataaatctaccactaataccaatactggcaaacctgaagaaaataacagtaaatcattgtataaatcatttttcgaagattttgaaaaattgaaaaaagactcacaatcaaataatactagaattacatcatttgaggaacaaaagtctttcaaacaagttttcgattatttatcaaaggaaacaaataaagtcggtgttgttaaatctttagaaacttttgttaattttcaatcaccaatacaaaaaagacaagatataaataattcaaatgaaattgatacaaatgatccaaaaatttcaaatagattatctttctttataaaagattcaggtccaattaatcttgaaactcaatataaaatgcattcattatcaaatcaaacttatattgaagcattagctccaactcttacatacataaataaaaatattaatacaagtaccgaattttacgaatttattaaatcaaatataattgaagaatttttgaaaaagtcctctactaatattaagaaaaaatcatataaaatggaagatatcaaaaagcaaagtgaaaattcccctcttaatccaatagtaaatagaaaaacattaccagttttattgaattattgtctaaactcacttacatttgatttcgatgcatttcaatcatctcaattattagttaattatattaaaaaacatgaagtcaattgaattatatggatttggattaaatattgatgtatataattcaattttcatacaaacatggtccaaaactggtaatttatcactaatttcagatttaatagatgaattaaaaattaatgcaattcaaccaaatctctatacatttaaaattttagcaaaaatttatctttattgtatgcgtttacaagatagcaaattatctgaaccttacattatttggaatgaagcttcatctgtgcataaattacatgattatcttcaagatttcagattgttataatctatttaaaccaataccatgcttctattcctaactctctcctttttataaagttaacctgtgtataataatgaactgattacgtaatgacactcggaattttagtaactgtttgtatttcaagaattttcatagtttttttcagtgtttttccttctcttagggagaaacgcgtaaaacatggaaattttggtgaaatttcagtttggaatcacgaaaagtcaaatctctaacaattgagttcacatgttatatactaaacagttttaatagtggagaagtaccaaataatagggctaacttttgataacaaggatgatcataactcaagagacattctatagggagttttcaaatgtatgtagagattcagtgacacattctacttgtaaacttgccatatttgtatcatgtttcaatattgatgcaatttgttcagctagaatgttaagtgaatattttaaaactcagtttatcgtcttccaattaataccagttattgggtatattgatatgaaagaaaagtatttgaaattagattcagaaattcaaaatataatattaataggttgtggagcaacagcagatcttgaaacttttttggaaattgatataaatgattttttacatccttcaatgaatcctaatgatgttcaaactttaatcgaccaaggtaaacttaaagatataagattaaataggaaaatatatgttattgatggtcatagaccttggaatcttgataatttatactcttcaccaatgatttgctgtttagatgataattcaacaactgaattggatagcgagagggaagcattttattatttaataaatgttgaagataatgatagtaatgaaggaggagaaagtgaagaggaagaaatagaagatttggcgactgataatgatgaagagaataatgaggatgatgatgatgatgaactagatcttgaagattcattagaaaggaaaagaaaatctccagttataaaagaatcttcaaagaagaaacaaaaacgattgattaatgagtatcaagaaataatagagaactattatcaacaaggttccacaatttcaataccatcatcacatcaaatgtatgatttattatcaactattggtgaaataaatttagatttcctttggttagcaattattggtagtagatcattacgtgatgtttataaacaagtttatcaattaacataccctggtttacgtgatgaagttaaaagattacaatctgatgaaaattcatttaatttaagaagttatactacaagtaataattcaataagtaatagtagaggatctgagatgtcatcaactaattccatttcattatcaaatgcaaatatttctaagaaagctgataatttaagtttacaaagttgtaaggagtatacattgtttttactacatcactggacattatataattcattttactattcaagttatattaactctaaatgtcatttatacactaatgaaggtggcagattgctgaaaactatgtttgcaagaatgggtatatcattaattcaagctaatcaaaattggcattatattgatctagaattgaaaaagaaacttgatgatttaattaaaagagagagttttaaatttaatctgaaggatattataattgatggatttaaaagaaattatggtttccatggatcaataacaagtggtgattatgttgaatctgttcaggctttattggaatatgggtatttagacaataagttttctctaagcaatgctgaaaaagctaataaaactaagaaaaagaagaaatcaaagaataatcatggtgatgattcagatgatgatgaaaacaacgataacgatgatgacgaggaagatgatgatgatgatgaaatcaaaaataatgaaagaaggagaaatgaacaattcttacaaagtttttggcgtgcgtatgactctctaaataactataatgatatcatcaaaggtatggaaattgctaaatttcaacaacaatttatatttgaaaaaggtagtgaaattatacagaaaggcatggttaaaacacaatcaaagtttaaagttgttatattaaatgaatcatttacttcaaattccagtattacaaaatcaaattttaatgattcaacatttaataaaagtaattcttcaattaaggacgatagagttgttgatattacttcatttggtaatggttcacaaatgttccaaaatccattaattctttcaaaattaggtaattggattcttaatatacaggcagagcttgaagaaggtttattacctctactaataggagcttataatagtgaatcacaaacgtacttgatatgtggtttgccatctcgtgctacatttgatgatgacgatgacgaagaagaagagaatgatgataatggtaattatggtgatggtgatagcgatgatgatgattatgatgataataagaagaagagaaaagagagagtacgaaagagaaagaataataaaaagaaagaaaaggaacaaaaggttatacttaatgcattttcagttttatttgaaaaggttacacaggaaattaatattcaagcacgtatggacagtttccaaagtgcgattattgaattaagaaaagaagatctaaccaagtttcttgatggactaactagatattcacaatacatgttgtgattttaattaaaacttttgtaaattatatctaaaagaaaatgtaatattatcatagaaagtcattattatcgggacagtgtaattatctttgtgataatctgttcatttgtttacgtttaaggattttttcaatatgctttttaacaattctagtcggtactaaggcatcttctaatgaatcgtgctcttttccttgaatattctcacttaaatatgtccatgctagtttttttaacggatcttttcttctaacattaacttgattttcactaaaaagaatagcagtatcaacaatttttggatatatcaatcttaaaacattcaaatcattctctaaaccatgaccaacaataattgtattttcatcagttaaataagctaatttaatcatcacctcatcaaatgtaagagcatcctttggaatggaatcaacaccagaaacatgagagtttaaatcaattataagttcaccatcaggatgaataatggaatcaataagttttttctcagttttaaaatcaattacactcaatttcatcatttcaaaacctttgtcagtataacacatttcacaatcaagagcaattgcctttattttttcctttcttaattgatttgcctttgaatcttcctttatatctaattttttcctcaattgattgattttaacaaatggtttactcttatgtaaatctagtggattatcaaatttgtaaacatgatgattcaacttagaacatccattggattgtccaattggttcattacaacatgaataaaacttacttgcataatctgtaccataaatttttttacccttattcaaattttcataagttgtcgttattctctttccgggatgaaatgtacaattaactatatttttgatatcacacaatctaaagatagtaccacaatgagcacaatttattgtatcttggaacttgtgatcatttttagaatcagaaggaatgtccattacataattatgtctctgtaaacgatgaaatggaacacaaagatcttttaattcattgtaaatgttggtgaaatcgtcagttttattgccttctttagaaaggagttcaacagttttcggtaattcattagaattaaaattttcagttacagcatttgaggcattagggatagtaccgttattattagtattgtcaatagttattatttgataaggttgatgaagactcttttgtagtgagaattaatttcttccaatccgtactttttcaaattaaacattatttttttaacgacgtgtaaatattccattttagatttacattctttagaaatactatattctttgctttacacttttcactattagggcattattagaatctttattattatggaattggctattagctaatctgtattgtttgtagagtaagtttaagtaatgtagtctttcatcatgtctcaatggtgcaaatggtaatacagtctttaggtaatagtttaggaggggttgacatctgatacaattagaccctgactcgtagaaaagactgctgatcattatatcaattgactatacatgaaacattaacgtaaacagaaactgaaaatttttgaaaaataaaaaatagatttttccagaaaccattacatcacgaaaagtggttagatttattgacatggcgttaatggtaacaccactttattttatatcaatatcatcgactcaatgaacttcaacttcttcaatcgtctagaactctatattgtctcattgatggtaccttgtgacctgattatttgacatattgaatcctctatagagggcacttttgagttatttattttttgagtttataatgccaacggttttaatttctgatgagtatataaaaggtactaatatccccatataattataattgaaatatctctaatccttgtattattttaaatttatatattaattgtattttcccttatcaaaacaaatcaaaaaacaactttaattaataatgtctgacgaccattcaacaaacactgctgttcctgaaacttcattaccaggtaaggatgaagaagcacaaattcctcaacatccaaattatccaaacttatatgaaggtgctccatataactatgatggtcaaattcatccaccaagaactggtcttttaagaactagttggtacaaaagaactggtaattacagacctttcccaacctctgttgctgcaggtttagcttgtgttgcaactactcttttcgcattaggtttaatcattgcaggtgcaagacatactccatcttcaactgctttagttggttcattattcttctcatctggtttagttcaaattattaccggtatttgggcaattgttgataataatttatttggttcagttttcttattatgttatggtgcattctttatgtcattaggtgcaatcttagctccattctttgatattgcttcagcttattcagatggtggtttaagtgatgctttagggtatcttccttgcttcatggacagttttcactttcttcctttggactgcaacttggaaatcaactgttccattattcgttttaatgttctgtttatggatgttcttcttattatacactattgctgtctttggtaaccataaaggttgtcaaactgcttctggtgtcttctgtttccttacctcagcttgtgctttctatgcaatgtatgatgctttatctgaaccatttaactcatatggtcctcttccagaggcaaagattttcagaatgccagcttcttggagtgtcccagatgatgaaaagagaattgaatttgtttaatctaatcattaacaacgattagtcaaatcatttcattaataattattctattcatatcaaaaaaatattcaaaaataaatacaaaaacaatattcaatcatgattcatttcttatttctaatttctaatttctaattactcgatttaatttaatttaatttaatttaatttataatgaccttattttataaacacatatctaatttctaatataactaataatatttcaatataatataaacttgtatttcccaaagaaaagaaagaaaccatgcatcttcagcgtgttgaaaattcatgtttctgcattgtctcataataaagcgacgatttcttcactaaaagatcactaagcttgtttactagtgatttttcaacaacgatctctgggtgtgtatctcagtataaataacaatgagcatcaagtatgaagtaaggtttaatcaaataaaatttgaagaattatgcacacacggaaaccaagaagacaattatcgcaaaggtctaatatcggccattatgaagaatccaacggtattttctaagtctgatattgatagtctcttcccagttaataatgaacaattttgtttcaaaaaagtcttgaattggggtaaagataaatgggatgcagttggaactggatttgattacaaatattgtctttgtggatacacttcatattccaatgaacacggtgaaatgaaaatgtgttgtgatcatgaaagttcaacttctactctattgaatggaagatatgaaagtattagaccattactggccaaaatttttttgaatgatgagttacttgatagtattcataacatagatagacgtcgtataaacattgagtcttcaaaatcatcaatttttaacttaaatttacttttagaaagttacacacttttggaaaatggtaaacctgctacttactacaatgcatattttaaaatactagattttcctccaattttgagagatgaagagagtttaacatttgtatcaactcttttcaaatatgaggataatgctccaggatatttaagggaaatgttaaaagtattgatgcttgatttaacggatttacaaacgcatggtttcaaagtgacaaaaaattctgtggaatatactttatttatcaatttaatgtcaattacttcctttccgatgagattacctgcaattttggagtcaaattatgctcccgatgttaaatactgttctctctgtaagaacgctgtggatcctgcagatgatgaattgagattcggttcttttgatacagatttccaagaaaagccaaagaagtttgtaactaaaaccaaccaacctattacaacggaggaattgtgggatgctgtcaacagaaaggattttggtgaatcatcaatcgcaaaagcacgttcatgcttcactgatttgaaggattatgattttatgaataatattttccctgatttaaagcaactttttttagatgatttattcactactaaaatctgtgcattggttttagaaggtacacttgaaaagttagatgcacatcgattttaccttcatatgcagcatgttaatgatatcaaagaagcagttgatgaactaggtattattactgacactggttattttttcaattttttgagacccgatccttttaggaaatatgcatcattgaatggttctaacatctttctttgtatgtcacttctccctgtaatcttcagagatgttttcagattagaatctaactatggaatgattttacaattactacttgaatttaatcattatatgatgcttttcttctgtgttgacgttccaattgaagatgtgccaaaattaaaaatatcattcaaaaaactagttctttcaatccaatatatggcaaattattatcctttccttgatcctttaattggtctttcatcacatttagtacttcatatgtttgataagtggactagtgttggttcttttgtagatacttggtgctctcctagatataataatcatatccaaatgatattcccatttaagagtattgatggaatgaatgatgattattgtagagaatttgatactaatgataatttacaatttaaacaatttaaacatccactcaataccgtggtaaatatgacaataaaaaatcaaaggggaaacggaaagtatcgtcattatgtacctgatgatagaaagaagattacaaagttatctttattttcatcgttgaaggactcacttgcaacaaaatttggaattgaagatcctcaaaatgttccatgttctagttataattgtttgaatgtaggttcacaaaccattgatttaacatcgggtaagaaatttgcaaaagtcaagattaatggcaaatatgcctacattaatatcaaaaaaattttaggattcaatcatgaaaataaagatttgttagttattgaatataccaaaatgaagactgattctcattgggagcctaatcaatctgccgaatttgaaattgatagattcccatatgttacaaatctttccggaacgggtaccaaacattggttatggcttgatgacgatatagatctatcagttatctatgtgttaacctcttttaataactttattttagatcctagacctgtgtacaattgtagagtgatgacttgatagaaatctcaacatttaaaaatttcatgttttcaattcctagttctcttgttttttctttcctaccaaaagcaacgacacatgacagatataccacctccaactataccagactctatgaattctggttcagaaaatgatgaactaccaacaagatgggaaattgaactggaatttgttcaatcattagctaatacgcaatacctctcatatcttgcacaacaaggatatttcaagaatccagattttctgaactacattaattacctgaattattggaaacaaccagagtatgcaagatttttagtgtatccagattgccttcacatacttacattgttgcaaaatgaaagattcagagtcgatattctacatcaaaattttacgaatatgttgtacagtgatatggttgaatactggagagaatctttgctcaaggatgaagcacagaaactcgatagcgttgaaccagctattgaaataaagaactctccttctcgaataacaaacacttttaaagatctggaacaaggggtttcaaacgttcaaagtatacaaagtattcaaagtataccgagtcaagatgaaggaaggattacttctttatcgccaatgtcagatatatcaacagctaccccaaaagtatgaccaatgcaaactgaaaatttattaagcaactttgtatataatttgtataccttatcaacatagaatatgttctaaaagaataaatgaattaaaattcaattactataaaataatatacaaaaatgtcataaacacgtaaaaatatacacagataaataaagaaacaaagaaatagattctaaattttgttttctttatccaccttaggattagaaattgtagctggtttgtttccattgacactattctctattttgagttttacagaaggtgatcctgaaatatcattcatgctatttttatttttctcttttggtaaacctttcttattgattttaggttttttagaatcagattctttcttagctttcttctcttttggagttttggaattcttaggtgttgaagcggatgcggttaatgaagaagagagtttatccatcttatttccattctcaaagcctttgtctttcaaattggaacgattatttaggttttgacgggcaagtactgcttgtctttcacgttccttttgttcacgtaactgttgttctctctgttgatgttgctgttgttggagtttttgttgatgatggagaatttgcttttgtcttatttgatgcatattatcatatgccttgctcaataacatgcaaccaaatcttacagcttgtgtttgttttccaatttgatttaatttggaaggatctaagggattagaaataggtaggtccgaatcaaacatgaatctggatttaagtcttttcttagcatccatattacaatcatatgcatttcttctctttttggaattttcaaccactttaggttttactggactgctttcagaaacatcgtcatctttattcacatccataatattctcaccatcatcaaataacttttcttcatgatcaaatgtaccctttccaagtatttggttgctggttgaaataccatcaactctaacatcattatcggaatcttcagaatcagaataatttaaatattcttcaaatagatcatcatcggctgtacgttttctatccatccaaatacgaccacctctaccatgacgctttctaactttgaataaagcttccgaaacattaaaacgatttttttcgttaaactcttcgtaaagttctgatttggttctaccaaattttgtattaggaatttcatcaccaactgcatcataaaactcaggtaaatatgtatgcctatcatttttaacaacttgaccagtaaagaagttaattttgacgatttcagaatcattattactataatgtctattattgttaaatatatgactaaaattaatttctcttgaattttcaacttcaaacattgatgaagctatcgaactataaggtatatgagatttttcctcaatcagattattatcattcaatgacatatcaaaatatggattatatggatcatcagtaaaatttatccagccttcatcttgtaatttccttttgattaatttatcagaaacagccttcttgataccttctagtttatcttttagaacagtattaacagtagtcagctcaatatctggaatcttggcagggggtaatttaacatatggttgtataacagcttgaggaagtttattagaaatattattttcgttgttcttattgatattattattgttattggtttgggcattagagttggataattccatggatgttgattttttattagaaccagaagatgataattctgctttaatctttgttttgctggttttattgtttgatggtaatgagcctttattattacttttagatttttcttcattcttatgtacaggaggtggaggtatataaccgattggtcgacgtttctttttaggtttatcatataacaactcatcatcaattttaatattagcatctctcttaagctgtttgaattcttttctgagtttaagtgtttcatagttaacttctaataagttttgttttttcaattctcgttcaccaaccaaaagtaataaattttctgctcttttaagatctgtgtataatactttaagcttgtgaatactttgagtatcagttcttctggtttttcttgcttgtctaaattcacgtcttctaaaacaagtatatggattgctatcatctttttgtgaaggatcttcaaatttcaatgttgggaagaccggcttaccgtttctttcaattcttctatttttccaatgttcataaattgaagcaccaaatttctcaatcaattgatcaataggtcgaggatctctaccacttgatgaatcagcatcgtataatgttttgaattttggaatatttaattttttagctaaaatttcattaggtcttagatactttatactatttggatctaatgatattttctttatttcatcaaatgataaaatttgttgaggatccattgttaaaaatggttgtttttcatcaattattttatcaaatctttcacaaataatttcaaattcatcctcagtacattgattttccttggttaaatttttattaaatttttgtaaaaactcatcatctctttcgtccatattatattgacatcctgatgtatcttcaacaacagcagaaaactttatgtactcagatggctcactaaatttttgataataatacttatctgcttctttccatattctagatgcatctggtgttggaatataaacttgcttgacattagcacctttaaactttgcagcagaagcatttataacttgctgcaagtggtgttcttcttcttcacctttttcaacaccagtttctatatgttggagttcacgttgttgatcttcaaggtcaaaatctggaatatcactttgttttataacctgtagagtttgtttgacagaaatttttctctgcctaaaacgtgcgcctgcattggatacagggcccatatttttaattgaattagattatgggtaagatgaactgtaataacaataataaaattagtgtttattcaataaattggaaaaaattatgaaaaaaaatacttacgactgaactgagctgatcttatctaaccctgaatttggtaactattctagattttttttgtcgatagataatatttcaatggtaataacagtaataaaaaatatataattgaattaatttaagtgtatcttttgatgtctcttatctcaaatattacccaaaacgtttttaatttttagcttaattgtatgcaaattgttacgtaatgataactaatttttctgctctttggaaaattaaaaaatgtaaaaatagacaacgggcgagggtagagaattggtaaataaaaacaatgcaaataaatatcaataacaagccaatgtattaattatcactatcagatttgagtcaaatgtaaaagcaaattaagttagttatttttataacctcaaataatcaaaaaattaaactaataaaactgtatcttgcaactttattctagaagttatttaagaaattcaatcaaaatgcaccaaattttgtaagcaaattttctcaaattcgctgtttattatattatttttcgtcgactttattaatagacaaaaagtagttaatacaacaaacaaatatggatataatgaggcacttgatcaaccgatgaagtatctagtggtttcttttgaaaggtgacgaccgtgctcaaataaaagccgagcgagttgttgataaatgaatcaaaaaagacccaaattaagggtttgaaacgaggctcagaaggttaaatgccccggtggcaaatcccaaatacagccatagaagcgacgaatttcagtattcgtcggctaatttttcaatgtagagtgtcccaaaagagtaggtttcgcgggttccgtggctgcttaaccacaaatgtatgtttccggtaatttttgaaccttctttttgagagagatgagcaatgcatctggtcaaaaaaaaatactgtgtgtatcagggttggattgtttctacagtctataaatagttatttaatttatttacaagctcttttctcattagattatttttctggtgaatttattactgcaatatcgtatatacttaatgtcttttgtggaacttgacttggagattgtactaccggatcagatcctgcttgtgttttaggaaatgctaccacatcacgaatattggatgatcctagtagcatagagcacattctatcaaatccaatggctaaacctgcatgtggtgggcatccactctcaagagcgtgaattaaatgaccgaaaagttctttgtgtttagtgattttcaaaatttcttgaaaaatgaatgtttgtaattctgcatcatgaactcttcttgatcctccgccaacttcaactccattaataactaagtcataatgatctcccttgactttaaggggttcagttgctaaatattcgtagtcctctaatttagccattgtgaatggatgatgtgttgattcaaatttctcataattgtaacttggatagcctttttcatttggtgatatatcattttctactggactgaataatggaaagttcactaaccatgctgcaacaaaaatattatttaagtctttttgtggggttgaaccttttgcgatttctcttctccattgtgtggggaaatgttgaatcgataattgtctgaatctacctaatggtgttggattttcatatgtaagctcacttctgtcactaacggcaacaatatccccaattgagagatttaatttaatattaagttggtctattggggtatttaacttcattggtaattttcctgtccattcattaagttcttgtgcatttcttattttaaagataaatggttttctgcctttatattctaaatcatcaaataactcttttggtaatttaatcttcttaccggtatgctcatcgactatatttaaagcatttttcaaaacacatgcctcgatgactgggaattcatcacttgttatgacattttcaaaacactcactaacattcacaaatgttaagttggatcttaaatcaggtttatcaataccaaatttactcaacgcatcaacatagtttaatctagggaaatgttctccttcttttaattcaactaatttcccatcattctcccaatctactctatacaatggaactttccttatatctttccatacatttgtcactaaagtttcaaccactttttgaatatcttcccctttagcaaatgacatttccatatcgatttgagtaaattctggttgtctatcagctcttaaatcttcatctcgaaagcactttgctatttgataataacctttaaatccactagccattaacaattgtttatactgttgtggagattgtggtagtgcataaaaataaccatttttacgagtaggaactaaaaattctttagcaccttcaggtgttgatttaaacaataatggagtctcgatttctgtgaagctcattttaggttaatacatctcttgtaatagctgcaggctctggctctcatctttaatgcattttgataatatggtaatcttaattgtaagtatctgtactctggaggaaattgatttactaaacttttcaaagaatctaattgtgatgccttttcattagattgattcaatacttgaaagttatcaatagcaagttcccatgtctttttatcatctttattcttttgttgtttaacattaactgtacctgtaactgataatgcatcctctggcttcatagttctcaataatttacttagttcctcagatttagtgacaatttgtgtgaattctccattaaaatctctaaactttgcgaaaactaatgatttagagatctttctaggcaaaccttcaatccaaccattgatcgttatcttttcattgattaaattatcaaaagacttattaacttgttcaatagtatgtgtgaaatgtttgaaatgcaaacttatcaatagttttatttttttcgggtaattccatacattttcctgtagttatatgtatatatcgtctagagatgattttggattgtatgtttaaacccttaacattttggtttattgtatgtttaaagaattaagataaagaaaagtggtatattcttgctgagattgaatgttgaaaaattaaatcgggcgtttttccaaataccgatttttcaggatagtcaatcatgatacatgaaagcaatgtatttttctatcgatgattaaagtttatatacaagctatatatcagtaagatatttactataaatgagattatggagacatttccataattgtacgaagaataattttcttgaaagattttctaaattcaccctcatcatctttaacttcttcgactatatcaccatactctttgaaaatatttgtgattttaatttcataaacttcatctaatgaattatgttctaaacttttttgtttgatcaatcttgataattcaacctctttacctaaaagagagactattattaatgattgaattaacatacctctatttgattcattaccttcatgtggtttcaaaaatagatttaatgcttgattgtaaatatcaaaagacttgtctgtattaccaaaccaaccatgataaagaattagtgatgataagttattcgaagcaggtaatggagattgtggaactaatgcttctgcaacatcgatcattttaccatcttccttataaatacaatcataaacacaaactaatgataatgtagattttaaatcattttgttcaggtgttccatcaggtattttggattgataattttgaaagtaatttatggcagtttgtaaatcatttgagtgaaagcctgcagatttaattaaatcaagcatgattctaggattatcatctaatcctaattctaaaatttgttctcttatttcatcaacaacatctggtaatggtgcaagttcaatggtttcaatatttaaagtggatttcaaagttttcaaattttcagattcaacatgtgatgttaattgtaatttggatattggcataaacgactttaataatgaatttcctgataatgaaacaccgttattaattgaagcttcataaaaatagaggtagtcagaattatttagttcaatacttgaatcactaatgattttttcaaaaattgaggatggaattaccatttgagtaatgacagcagtacattctaacttaatcaatgatttcacaagttcaatggaaagagactcgtctattaaatctttgttacctatagtttcatataatttcattatcttaataagtttttgaaggtcaacagcatgtaaattttctttaacttcaacggggtcaccaaataatagtttcttcattgttgaaactaatatttcatcatgtgatggattttcaggtttaagagagttatacaaattccaacttgattcaactcttcctggattatgagtgatcaattgatttatagaattttgagataaactagttttatcatttaacagctttttaaatgcaagggttgaaattgcataattatatttagtaaatctttcaattaaattattaagtatttcttttttgacttcttcattaacatcaggcgttgattccaacaacttggataatttcaatgataaattatataaatcggtatattcctcttctgttttattagatttggagtccagtattgtggcatgatggttaataatatcattaaaatcgttaacagactcaattttagttgaagagtcaatgaaatttaatgtatccttgatggagttatgagaagataaatcaatgtagtttgaaagagattttgagaagtgtctgagttgtgattttacagcaaatgtgtgaagctttaatgcattgaatttcagcatatttgtgtggttactgaaagaaacgagagaaacaagagatctgaaaagtaatacattatcagagacacaaaatttgatgatttaatttttttgtcagtatagtaataattcgggctttatcaagattgaataaatttttaaaaataagattttattactttttccaatattttgtaaccgaaaacatgagttggtaatagagatccactcgtgactaataatgagagactaataattgatttggtaatataacactcctctgcccatacaatttggcatatatggcttatacgtgactcatacggaaaccttaattaatccctacttataatatgttttttaagcgatttaatataaatagacgcaattaatttagagaggatctgtacattgtatgcttattgtaaaaatcatctacttgtatagaaagataaactgatagatctgatgtttataagaagaagccgtcacccattagagttactacccgatactaaaatacccttgaaacaatggaaaggtatttatatgaatgatcattcaacgagtaaacaacaatcattgtcatatttttggaatgagttttacaataacgaggaatggtcactttggaaagttgattataagtataatgatgaaatagatgcacaatttaagtttgataatttaattagcggatttttcaatagattactagaaactgttaaatttatttcaggagttactatcgtttataggtcagaagaaggtcaaattggtataacaggagcttttgtcattagaggatgtgattataagacagcgttcagttcagcacctgaatgggattcatttgaatacacccaattgaatccggaaatcaagtccgatgtgaaattcattgatcaaatttggggtaagaacaatattattgatataaatggtaagtcatttgatgttattaatagtcaaacactccttggaagccgtagtaatgccatggaggacttctacgagatacttacagaaagtgaagaagagtagatatatcgatgttagtaataagaactaaatgagcctccgacggtaagactgtatagtaaataatagttaaattaaatagtgaaaaaagggttaaagaaaagacctcatagtaaattaattgcggaaagtgtcttttttgccacatttctcgtttcccttctttttttcgacgatttgctcacttttacattaattagctataaagagacactttcttcttgatctttttaaattcattaccactttaaactatcctacaatccactaaaaatgtctcaaggtactctttatggtgatgtcgaaacaagaagtattcttcctgttggtttagttaaggctttcaaccttgatgttaaacttgcaaagaaaggtgatgctgctcatgcagcttccttcccaaatggtaaagttccagctttcattggtgaacacggttacaagttacaagaatcagttgctgttttattctactgtatgtatcctactacattgatttcatatatcatatagtcatataatcatattgatattaaagtgtggcacatgttttgttaagttaacttttcaattaatttttttttttcaacttctcatttttttctcaaaaaatattttttattatacccataatacatttgaaaagttatattaatatgcactcaggcagcactctatcacatcacactacattacattctcaattctttctttttttaagtgatgaaaaagaattttattcaattatacagttatccctgtcttaaatataatgtcgagattttaaatctgaaaaaattagaaataattaagaatggtgattgatggtgatggtaaattaatatcaattactattccaagaacaaatatactaacatttcactcttttattatagtaatcagtttacatgatgctgaatccccattattaggtgttggtttagaagataaggctcaagtcttaaaatacctttcatgggcaacctctgaattaatggtcccagttactgatgttatccgtatcttattagcaagagttccattcaacaagaaggttcttgataccgctaatgttaaagttgatgaatatgttgctcaattagaagaaagattaactaaaatatacctttttagttggtgaaagattaacctgttgcagatttatttgttgcaacttgtttctacagatgttttactttaactttcggtaaagaatggagatctaaacataccgttttcatgagatggattaacactgttgttaaaactccatacttatcatatttctttgatacccttaaatttgttgatgaaccagttaaacctcaattaccagcaaagaaggaaaagaaacaagaagctaaaccagctcaagcagcaaagccagcagcagctccaaaaccagcagctgaagcagcaccagctgaagaaaagaaaccaaaacatccattagaacttttaggtaaaccagctcttgcaattgatgaatggaaaagagtttactctaacaaagagactagagaagaagcattaccatatttctgggataccttctacaatgataatgactggtcattatggaaagttgaatataaatataatgatgaattaactttaactttcatgtcaaataacttagttggtggtttcttcaacagattatctgcttcaaccaaatatatgtttggttgtgctgttgtctatggtgaaaacaatgctaatggtattgttggtgctttccttgttagaggtaaagatgcaattccagctttcaatgttgctccagattgggaatcttacagttacactcaattagatgcttctaaaccagaagatagagatttcattaacaacatgtgggcttgggatcaaccagttgttgttaacggtgaaaagaaagaaattgctgatggtaaagttttaaaataagctagttctataaatttttctctttaagacaatatcctctataaatataatgtataataatttattataataaaaacaatcaatcaatcaatcatataaacacaagttatttatttatcatttaaacaatcagtatatgatttattgttaccaccatttgaattgaaatacctttccgtttttaacagcttccattgcaacatcactaatacatttaaatcttgcaggtcctaatggtgttccaccataccatcgtgaaacaataattaatatattaaccaatttgattctagtcaatcaatcctaaaattcgttgacctgatccaccttcattattatcattaaatccttgattaacattttgtaatttagcttattttactagaatttgaattagaatctgcagttttccaagcatacattgtaggatgtgacgcagttttcaaatgtttatctaatgtataaacttccttcaacaattgaggaatttcattatttgtttttattggtattacaaatgccttgaatttggatttcttaagtactaatgtagatgattgaatccatgacatgtcgtcaagaaaaagtagtaatatttaactaagttcagaaatttaagaatataactttagatagagcgttaagtaattgaaaaatttagaatattagagatcctaaaccttcttcttctaatctttcctttataaaatataaagcaatggcagttacctagtaatagggcaggtaaaaaaccagttacttctaagaaaacatctaagaccttcgagtaagaaactggatgttacacgaacaccactgcaaaatgatgataataacaataacgatgataatgacgataatgaaggataatgataatgatggtgatgaaaacgacaatgataatgatggaagtccagtgaagaataataattatatatcagggggtgattctaatacatataatgatatgttaagggataaaaatcgatataagtataggaattgaaattcaacaaatgatgtttgtttcaggtgaaataaatgatccattagaacgtacaactgatttaattgaagatattgttagagatcaagttgttgcattaatgttacaagcacagaaaacatcacatttaagaggacaaaaatcaattttacctgaagatttaatctttcttattcgtcatgataaggcaaaagttaatagattacgtacttatctatcatggaaggatgttcgtaaaaatgctaaagatcaagaaaacggtgatatagcagcaggtggaggtgataatttaattgaagaagcagttggtggatctggtgataataaattaatggtaactaaacagaagaaaattttaaaattaccatgggaattagaatttatgtttacagagcaaccattaattggaggactgaatggtagtaatattgatgatgaaaaagttaatgaagaagaaagggatgcagttttagcacaaatcaaaagattgaagcaaaatgatgaaagaactaaaaatatgacacaacaggaatatgttcattggtcagaatgtagacaagcaagttttacatttaggaaaagtaaaagatttagagaatggtgtagtatgtcacaaattacagatagtagaccaaatgatgatgttattgatattcttggatttttaacatttgaaatggtttgtacaattacagaggaagcactgaaagttaaggcttggatggataaattaaatgataataaagataataatcgtcgatatcttttcatggaaccaagtgatgataataaaccgataggagttgaacatgtacgagaggcagtggagaagagttcaaagtgttccgagaaagaagaaagcattgcataacttccgtggtggtagaatgagaagtaatgttagaattatataactgaccatataagtatttaactttaagtaattgaaatatacgccttgtatgttaattgataatattatcatgatgaattttcaatgttggcgggaataggtaactttctttttctaatgttatgaataggaatagtcataagaggtaatgatatttccaccagggaccattcactgatgaagattatgatgaaacatttataccatcaccaacatcgatattaatattgggtagtggaggattaggttgtgaaatacttaaaaatttatctatgacagcatctgatgaattaccattaaacttacatataattgatatggatacaatttcatcgagtaatcttaatagacaatttctatttaaggataaagatgttggtaaatataaatgtgaaattgcgaagtttagcatgttaaggatagaattaaagttgaatattatattggtaaaattgaagattatgaagattcattttatgaaaaatttgatattataataagtggattagacttcaattaatgcacgtaaatggattaatgaaacaatatggagaatttataataatagtaataatgaaaaatcaattatattctttgatggtggtacagaaggtttccaaggtagtattaaaataattatacctggtataactgcatgtttccaatgttatcaatcacttatacctgaaaaaatagtttatccattatgtacattagccaatactccaagattaccagaacattgtattgaatgggcaaaacagttaggttgggaagaaatttaccaagataaaatatttgattatgataatgatgaagatgttgaaaagatgtttaaaattgcattaaaacgtgccaatgaatttggaattgaaggtgttactaaaagtttaacattaggagttgttaaaaatatcatacctgcaattgcatcaactaatgcaattattagtggacaattatgtaatgaagtttacaaatttatcagtaacttgcaatccgaatatgaaagatatgagttattataatggtgaaaatggggttcttttcgataatgaagaatatttaccaattgataattgtccagtttgtggtataagaactgaagaaattgaactagattcaaatatggaattaattgacatagttcaaacaatcaaagataaatttgaattatcaatgccaataataatgcaaaatggaattgaaatttacaattttaaagaccagggtggtagtttacaattaagcaaagaagaagatgtgacaattgaagttgttgataagacattgctcaatggtatgaaagtaaggataaaatattataatgtttaataaatgttcatatatttaattcaaaatacacagtattttataaataaattaataaataaataagttaaagaatttgctttaataaaatctaaaaagtatcaattaaccgtgtttagagaagtattccttggagttagttggttctggtttaatagtatcagcaccaggagtccagtttgcaggacaaacttcaccgtatttatcagtaaattggaaagcttctaataatcttaaagattcgtcaactgatctaccaactggtaaatcattaatagtgacttgtcttaaagtaccctttggatcaattaagaagatacctcttaaagtaataccttcatcttctaataagacaccataatcttttgataaggaatggtttctatcagcaataagaggaatattaagtggacctaaaccaccttcagctctagcgacattagtccaagctaaaagagaatattcagaatcagttgaagcaaataaaacttcacaatctttatccttgaaagattttgcagcttcagaataagcaataatttcagttggacaaacaaaagtgaaagccattgggaagaaagctaaaaggacccatttacccttgtattgttctaaagaaacgtcttcaaagacaccattgatgactgcggttttgttgaaagctggagctggagcttggatagaaggaacgaccattgtgattgttaattgagttgattgagttactaagacaagaacaaaaagaaagggtggcaaaatcaggacatatcgttaatcgttaaaaagggcgaaccagcagtggctttatatagaaaaagcgagcgaaatggaaaagtctggaaaataatccgattaataaggaaaataagtaagagaagctctagacgattctaatattattaatattatcactattcttcattattaataacatcttcttcaatctctctctgtacctctctcatcatcacatctcccgtagggaataatgttaatgtgaataaaattactgtagctatgcttcttataagtaaattgttctctgtggacattgcactatttactatccacttaacaccgttcttactcttggcatagaaagtattggttatattggtaatacgaaatgcatcagtatctatcattatcattagcaccaagactagaggttcaacaatcattctcaatttaaatctggctactccgaaaatcattacaagtaatctatcaatgaagtataatattaacatgtatcttggtacagctgttagtattcggaaaaataaaccaattatagttctagatatgaattgaataaattcaattcctcttgtaccccaaaatgcataatctgtattattgttattattattattgtcactattattatccattattattatcaactacaacttcttcaacttcaacctttggtaatttcatactctctactcgtttatgattactcctattccaattcatattgttagctaatgatgataatttaacaaatgcacctctagtcattgccacatatccttcaccaacaacaacttcctcagttgtaaatattgtatccttatcaggtggtaatgacttaccatcattgattgaaacactatcaacaacatatcttgatttacccagtacccaatcaggaacttcaccccttataagaactaaatctttctcaaatttctctatctcagttatctctaatccttcaaacctaggattatcctctacccatctaccaatggccctcactggtaaatcttctgggaaatacacttcctcattgatacaatcaagagaaatccctctataagttggatagatagttattttgactaattgcattgtatattatatttagtgatatactaatgatctactgtataacaccaatcaaagactactactatactcttaactaataataacaggtatatcaaattctcaattttctcattaggggattgattttctaattttcttcattttttcttgttttttccattttgctaaaaattgcatcattaaattagctctatacaatctcttttcatcacttttttaaccaactgaacaatcatgtcccttagagcttcatcactccctattgttcaacgtaggaactttacaggattcattagatcagttctgtgtcttgatcctcctcaatctgataattatccaactgttgaaaatagatttcatccttgggattcatcaccatgtcctgatttaagaatgagagctgcaactattagagcaaaggctaaatgtcctgttactcatttaaatatcgattatacttgtccaatatctggtataccaactcatcattctaaagaagcttgggaaaatgataaatattatcaagataataaaatttatgatattttgaaaaaagttaacatttatgaacacgaccttagatctggtagagatttcccagaattcgaatttccaactttccaaaaaagagataatttagttaatttagcaaattgggatactttcttctatactcgtggttttagttcaatggatactgaatttcaattagcaattgttactaaattattgagtttcccaatgactctagcttcaattttacatcaattctctccttatttcttaaatccaaaaggtcctctatcaattgaaggtttaaaatctttatcagctttaagatattctctttatccacaacatagactatcaaattttagagatcgtccaatgagaatctttttacttaattcaaattcagaatctttattaccacctcatgtttggaaagaattaacttacatgttccctggtgttagttttgaattacattttatcggtcctcaatcatattttgatagagagaaaaaacaatatttagtaagtaataaaccaattattaaaagattagatgatactttatgttttgttcatcatactcaagattttaatgttttacatgaagctggtgatttattcccttatgatccttatttagatatgtttgtcgcttatcatccacaatttaataatccaaatttaactgaaatgtgggataaaacaattaaaggtttattggattcaaaatgtccaatttttataactggttataataatgaaaatattaattcaaatgaagattatttgaaaaaatatgaaaaagatttagatgttatttttgataaatcagataatttatataattcaactaaatgggaattaaatgatttaaatcctcaccaagttttccaatataatcaaaaagttttaggtataagaggtaaaagatatcatgcaattcctaaattataggttttttcttcttttcttgtatataaatgattgtataattccattaaaaacttaaacgtaatttattttgaaattaaatcattgttgtagtactgtcattatgttaataattgtattttatgtgtttgataaataaatgttttttgattgattttgaataattttaaaacatttccttgatttttgaaaactagacatttttaccaaaatattactataaatttatttacacaagaaaatcacaaattctctttcgaaactatgtaaatatcgttttcataacatcactagttgttgagaaaagagcgtttgaaatttcggcgcttttttaaacaatccaacattataaacatcctacaaataaatctaagcggttacggtcttgtagtgtagtggttatcactttggattctgattccaacaaccccagttcgaatccgggctcgacctgcctttttattttgaaatttcaatgtagtaattaagtaaaaattaaagtcttttttttataaaattttttttcccctataaccaataagtacattacaccaccctccctatgtctttatacacacccctactactatagacttacgactaccatcacaattaccaacacaataatccaaattgaaatgcgaagtgaaaatctccggtgacggaatttccaaagagtgagagaaaaagaaaagaacatgtggtgggtgagctcttgaaaaatttaacattatttttgagtcatctttaatctttaagtctctcaggagaaggagtataatttacttaaactagataaacaatgtcacaagtttatagatcaaccagatcaagtactgaacaatcagtctcttttgaagaagcaattattaccggtctggctaaagatggtggtcttttcattccttctgaaattccacaaatttcatcaaatgatattaaatcatgggaaaatttaactttccaagaattagcttttcaaattatgcgtttatatatcaaaaattgaagaaatcccagatgatgatttaaataaattaattgaaaaatcatattcaacttttagatcaaaggatgttactccattagttaagattgattcaagagaaaaattacatattttagaacttttccatggtcccaacttatgcatttaaagatgttgcattacaatttgttggtaatttatttgaatatttcttacaaagaaaaaatgctaataaaaaggaaggtgaagaaagagatattattacagttgttggtgcaacttcaggtgatactggttcagctgcaatttacggtttaagaaataaaaaagatgttagtgtctttattatgtatccaactggtagagtctctccaattcaagaagatcaaatgacaactgttactgataacaatattcatacattctcagttaatggtacatttgatgattgtcaatcattagtcaaacaagtttttgctgatgaagaattcaataatacttatcatattggtgccgttaattctattaactgggcaagaattttagctcaaatgacttactatttctactcttatttccaattaaagaaacaacttggttcaaatgatgatttaaatgttaaatatgttgtcccatcaggtaattttggtgatatacttgcaggttattttgcaaaggaaatgggtttaccaattaataaattagttgttgcaactaatgaaaataacattttacatagattcattaattcaggtaaatatgataaagttcctgttaaagttacttactctccagcaatggatatttgtgtttcttcaaattttgaaagattcctttggtatatgattagaaaaactgatggtaagaatgatgatttgaaaacaggtgaaatcatgaaatcatttatggattcattaaattctaaaactggtgaatttaatgtctctagtgatgttattgatgcaactaaagaatttttagaatctgcttcagttactaatgaagaaactgtttcaactattaaagcaacttacgatggtacttcctaacaaatatatcttagatccacatactgctgttggtattaatacttgtttaagattaattgattcatcaaatgataaagatgttcattatatttcattatcaactgcacacccagctaaattctcagaagttgttaatcttgcattaagtggttttgaaggttattcatttgaaaaggatgttttaccagatgaactgaaaaaactgtcaactatgccaaagaagatcaaacttattgaacaagctgatttaaaggttattgaagctgcaattgttgaagaacttaaaaacgaaaagaaataattaatttaaactaaataaaaaaactcttgtatattgtatatacttctacttatatattaaattgatactatcatttatggattcatatagaggagcattttacaagacaagatgaaccattgatcgtaagtacatacaaaagctgatcagtgtatcagacgcgtctactcaaatggaatacattatagtttataacctattttcacattggattctttcatcccagtactcctaattaaatgacattaattgataatatggcaatacctaacccagaatactttgacttcaataaacacaatgtgatatcaatacattcactttagtcaaccttagtgaaagctcacatgaaaaccaccccaatttgaaaataacttcaccaaaagcgagaaatttgtttttttccaatacatttcaattatcattattttctacaccttaataccactctttattttgaacaacgtatacttacataccggtgggtaacgatacaattgttgtaatataatatataatgtcaatgcaacgtaataagaaacaacagttaacaaaaccaggtagtgatacctcttctgtaaagaagactaccccaatttcaaaacctacacaacaacaaccaataccatcacaatcaaatcaaccaattcaattgaaaccaactgatcaaactataccaccttcattaaaggaacattttgctgaaaaagtagaattatatgaacaattgcaaagtcgtgaacgtttattagatatgatgattaatagaaaattattagatttacaagatcatcaacaacgtattagtacagctgatttatcaggtcaaattaatgaagaaactttacgtatttatatttataatacaagtgaaaatcaaccatggcaaattcaaaatgataatcaacaacaaccacaggatcaatcacaacttccaactcctgcttggactctaagagttgaaggacgattaattaatgataaaactccattaactgatcaatcaagacataaaatgtcatggtttttatcaggtttaagtatcgaattaaaaccagctgatggtaaagacgatataccactaaatattaaaggtgtaaatactccgggttcaacaggtaattcagaaactctcattgagtggcatgatgataataaattacctgaagctgaaagacttgctaaacaatttgatggtatggatatcaaacgtgcaggttcaagtattgtaaatggtgaaggtgaagaaagggaaattgttgctcatattgttattcaaccaaaattattcccaattaaattgaaaatttcagatccaaatttaattgaacttgtaggtgctaaagaaattacacaatctgaagtgtattaaaagaattttttggtatgcaaaggttaatcaattatttgaagtacaaaaatcaaatgactcaaataagagcaaaggtaagaaaagtgttttaattaaatcagatgaattattaatgaaaatatttgatttaccaactatgacaatgcctcaaattatggaaattgttggtaataagttattaaaaccactagatccaattagggtcaattatcatattaatacattaaagaatactacattaggtgaagtattagttgatattaaagttaatagatcattccttgaaggaaagaaagcttcattatctgatttggatgatattaataaattaataacagaggatattttaaataaacaaaatatggcagatcttactaaattagatgaaaattctaaacttaatatgcaattacttaattattcgaaaagtaaatatgatttctataagaagtttagtgaaaatcctgttgaatttttgaaagaggttatacagaagaatgaagaatatttgaaaattttatcaagtgattcaatgtcatttggtaaagatggtttaggtagtgaggaaatagtaagaaaatcagacttttacactgatgatttcttaagacaacatataaatttattacttaattccggtagaatataggtttagtaactgtataacgtttgtattttaataattttcaattaaatctaattcaatcactcttcatcaagctcttgtagtttcatatacaatgtttccgcccatttcttattgaaaatctcacttcttctcattgctaatgattcaaatgtggggaatttttgactattttgaaattcattagcataccaaccatcttcacaaacatagattttatcaatgatgttttcaatccattctatttctaaacattcctccttatgtttgatacttaacaacaaaggtttcaaatgatcaaactctgtatagttctggtatatttccttatattcaatctcttcaaaccccatccgttatacctcaagaagagttgagatcgatcaattatataagataaagacttctccaggctgtgtaacatgaaaatatttttcattaatgatttttcattgcaattttttttagcttggattttaactactgtagttactttatctttaggtagacaactgaaatggcaaagaaaggtggtgtatcaaaacattcacgtgctgcacgtcgtggggaagttgatcctttcaatagtactgaagcaaaggaactttcatcaattccaagacttgaaaatactgatacaattgcacctttaattcgtgcatcattaacaaagaatcaacaattattaaatgataaattgagtagatcgggtaaaaatgaaatgaaattaaaacctggtgatcatgtcataacaactcataataataagaagaagcaacatatggtttctaaaactatacgttcaaagcaacatagattccaaagtgttgatggaaggttaggtaaaaaaattgaaaatgctttaaacagaaagaagaaaattggtaatttaagaaaaactggttgggataaaattaatgaaattgctaaaaactcacttcaaaatgaacttatcattaaaagtaacagtgaaaaaattacaaatgaagacttagaagatgaattagctgatgaaatgaaagatgatgaagaaatcttagaggaaattactcaaaatactaacaatcctttcgaacttttagcagaagaatagtctttcctcacatattatatacatttttatttactcttttctataaagcaatatacacagaacatttccactatttcaatttcaagttatcagtaaactttctttgaaatgattcttcaatttcagctaatgtattattagcaaattgacaaactaaaagatcttgatctttctcagcaacatattcaagtaaaatttgtgacttcttaccatgcttctgaataatttctagtcctttatcattacgtacaatatcattgataatcacgacagcagctcttcttaattctgcatctttttcaaagttgacaataccttgaactaaatctgcaatttcatcaacatatggcatgataccaaaccctgtctcaaagcaaattaaacctaaaattgaaagtgctgacatcttcagcttaacatctttattatccttgtacttttcttgtaattttgagtttgaatcttgatatatttatacaagtggtaacaatgtctcgaataatctcaggagttaataatttaccgtccattgaaatgaatcttgtcaaaacttcaccgagtcttaatttttcatcaattgatttcctagattgagagtatagttcgagaatgtaattagtgtatgacttatcaaaagagattaatgaaaccaaatttttaatagcattcaaataaacaaatggttctgagtttcttagttgtgatactaataaagttatggtatatttagtggtaatggaattattgttggtatttagtacctttgtatcattcaataacattgtttgttttgttaatttatccaaagcaaaaactttaattgatggtgttggatcatttgcttgtttaagtattgtgtctacattgaactcgttattttcatctttttttattgtaagttgtttaggatcaactttcaaaattttatcaacaacaacagcaattgatcttggaataaactttttattatgttcaaacatggaattgtaatttttctaattgaattttttcttcttcactgaaaaaagttaaatttgataaaatgtcaagtataggtaataacgagttaattaattcatcattttgagaaatttctacatcatattcatcctcatcatctgaatctgactcattataaatatcttcaactgctagttttgatctacaagtatcaaaatatccactgaaataagtatttgtgaaaattaataatgatattggttcattctcaatttgtgatttaaaattttcaattacagattgaagtaattttaaaataacaactctcttaattggaatctccacttcagatatttcaacatagttaactaattgatttaaaatatcaataagaatcttgttcatgtattttgaatctgattgagttaagatttcagacaattcaataagtgttgcaacattaaaatctattctatcaaacaaatctagtatgaagctctctttagaaacaggcgactcattagtatcaagtttaatatatgtcagattgttttctgattcagtatcaaatttccaagctggtttatattcaacaatgttggatattaataagttcataaaatgatcaaaatctcctagtaataaaacatttttaagaacattcaaaatgattgtataactcttatttgattttctttgatgatttgcataataccataatggtaacaatattggttctataaactcattaagaatttctttattagtactcgtaaatgatcttgaaagtgaaatacacacattgaatgcattatttaattccaccccatttattataacaatatcagaatcttccataccatttttaattctaatttctggattcaatttttcccatatttttttgaagagaaaatctattataatctgattattcttttgatagatgtttataataatttcagttaaaacagtgttcattagaggtctatctatgaaaaccaacatttcttcaatttgatcaaatatgtttgtataatattgaacaattgaacaagtttgaggtcttgaagaaactaatatttgaactacataaggaattttagcaatatcaatatcttcatcttctcttaatcccatgactaagtctattagcgactgaacaccatttggtttcatcaaagttttgcataataatgatgagatatactttgtaaattgagcgttttttacagaattcaatgaatacttgtataatatagagtagaatgataataattgataggttgaacttaatgtttctagtctattcaaataggataaatattgatcagttttgaatttggaatacaataccacggcaattgttagaatatcagtgaacccagtacctaccaagagtatatctttcaaatcactatcactttcaaaaatttttgtaaatttttcaagtattttatcaagcatgaataaacctttttcaaaatcaatcttaatgaatgttttagaagctttaaagtttttcaacattctcattttcaaaggaacaagatattcatttggtattattgagtaaattccatgtaataatatgatatttgtcagatcacctactattctaatatcatatagagggattgaaattatagtcgaatccttctttttcattgataactcattgattttatcgaaatattcaagtacttgactaataacaacatccctcatctgaatttgatcaatctgagtttccacatcattatctgtgaattgattgtaaagatatttaacagcatccgtttgtgattgatatgctgataatttatttgatatttcattgaaaagtttacccaatggagtagttcttgatctaccttcaattttctccccctttttaaacttttcaagttctttcttaagcttttccaatttctcttgatccattgaagtcatagtaaagggctatacaacaataagaacgccatctaatttattaaactgaaatttctcagtttcccctgatagagtaattaaaatatatttttttttcatgcagtggcagttgacaaatttttttcactttaaaatcattaagttctaattgttagtgaagggaagtgctctctacagatatacataatcaacttaataactatgacaaaacttgataaactctcacaagaggaaatggataatgtgatctatgatgctagatttggtgatttagaatcattaacagagattttcacaaatgaagttgaaacttcagttatatcaacaattaaagatgcatatacattttcaacaccatttcatatggcagcagctaatggacatttagaagttttgaaatatttattatcacttataccggatgtagaggaaaagaagaaattactaaatttagaaaatgattgtggtaatactgcattacattgggcatcattgaatggacatttagaaattgttcaattattatgtgataatggagcagatccatttataaggaataaatatggccatgattcattttttgaagcaagtaataatgaacaagaaaaagttgatgattatttacttgaaaaatttggtaatattgttgaagaagagattgataatgaagaaggagatgaagatgaaaatacagaggaaggtagtaaggataatacagaggttaagttcagtgaaggtactgaaattaagaatgttacagaagaagatgcaaaagcagttgaagaactcagaaaacaagctgaaaacatcagtctttgaatctaatccattagtttcagtttattaacttatgaaccagtattttcagattttagagtaatgatttaatataatctaacttatatattatatagttacacttatttttatacattatatagtgtgattggttcttttaatcttgttgttagaaatatggaccccgcacaaagagtcgttagattacaacaattactatccgaaaacaaacatgtcaaacgttcttttaattgatttcattttatctattttggaccagcgttgttaagaacataattcttaacatcattagtgtccataagacgatattctgcacttccaccaacaaagtttttgacattcacattgaacttataattgaaaatactcttatcaactgtaaaagtgttataggtttgcccgtcttcaaaaatattaggaaaacaatttctgcccaagtatgaattacaaataggattagctgcatttaagttttgaattgatggagcaaaaatagggtcattactatttttcttcattatagggttaaatgttttgatatttgttccaacattgtcataatcattaccttctaggaaaatagcaacatttggtgctgttctagctcccatgtagaagttagattggaaaagattgtttgcaacatggacaattccagcccctgtaactgaatcttgttgtccaacttctggtaatcttccggaagtattatgaacccagttcttttgaaagctaatagattgtgcagcaccataaaaaaggaaattccagtaatgacgattatcacaatagtgaccataacctgttgtaccatcaaaattattatttgttatagatatatcagtagctggtccccaacctgttacaataaattgtcttccaattcttgcaatataattgtggtctattttcacattagaagcattatcaatagttattgcatcacccccccaaataacctgttcatttatatctgtaatactcaaattttcaattataatatttgagactccaccagttaagagaaaccctctacctttgacacctgaattagcacctgcccctctaatgactttatttgagcctacaaccaggggatcttgaccaagtgggttaatagtaacatcaattattttcttgttatcgcaatagcccaatctgtcaataatttgttcagctccctttgtatcaacacaattattatcagaatagacacaacctttaactttttgaaatgccacattttgattaaaatcaataataccattaatagtaattgttcttgctgagttatctgaacaaacgtttgaacctgagtagctgctacataatgcattagcaagttgttctttggcattgctatcaccagcattgattgtaatgttgtcgcctaaatcagcagcaaaaacatttccaaataaggtgaaaccaagtgcaatactgataattaatgacagtctcttaatttgaatcatttttgataaataaaggatgaaataaagatggaataaaaaaaaattaaattcaaatagatttttctttttaaaactaaaatattaggaattggacggttatttatggtccgttgaaaacattgttgctttacgtccataaaaagttaaattgtttaatgaaaacattgctgttttacatccacgaaaagtttaattgttttatcagctgataaaaagtgatggcagatctttcagaatttataggaaccaaattttcggggataacttattatataatacgtcattgatagaatgtaaaacccacaatagaaaatcttttcaattatatgattgctggtgcttatacctatactgtgtatgtaactgaatatatgttcgtaaatcgaaagattggtcgatatccaaaaacaataagtatactacgttaagttgcatataagtttgtatttaatccaagaaaaggcaaatactccaagaccctcttcccaacagacgatgggacgatcgcacagtaaaatttcactaagtaattttaatatgacaaatttgaatggaaaaaaaatttcaaaatttcactcttgtggagcttaatagcattagagggacagaggtttggttctggtgaatcttttattgaatatatatcttattgacaagcttgaaatgtctgccgaagaattaggatttgatccttccattaaaaagaagaagaagagtaaggatgttgcaccagtttctgcagattcagaaactaccacagtcgcatcaacagaagatgatgatcttttctcaggattaaagaaaaagaagaagaagagtaaggataagaaagatacaagtgaagaaccaagtgcagatgttacagatgatttatctgaaagttttgaaggaatgaaattgaaaaagaagaagaagaagaaagtagttgctgctgatattgatgaatttgaaaaacaattacaagatgcaggtattgatgaatcaatagttaatgaaacttctaaaaaatcagatttaatcccatattctcaattattagatagattttatggtatattaaaggagaaaaatcctgaattagcaggtggtcaacaacaaaaattaaaaattcctccacctgaagtgttaagagatggtaataagaaaacaatttttgcaaatgttcaacaaatatctcaagttttacagagaaatccttctcatttaattcaatatctttttcgctgaattaggtacttcaggttctattgatggtgaacaaagattaattattaaaggtagatttcaatcaaaaaatattgaaggtgttttaagaagatatattcaagaatatgttatttgtaggacatgtaaatctatgaatactgaattaaagagagaagctgctaatagattacatttcattgtttgtaaagcttgtggttcaactaaatcagttacttcaattagaactggtttcactgcaaatgttggtgcaatgaaaaagaagagagtttaattttattcatccatttaattaaatttgcattaaatattttgtattttatatattatatataactttatcatatgtataatatttatggtaaaaaaaaaagacatattatatcattagtcttcacattttgaaagctctaccacgggaaatcataggaatccttaatttgctctgtacaggcttaaatttttcaattgatttaagcttatagtaaagactaaaatattcataaacctctttgaggaatagaactgtttgaaatcctaaatactcaagtcaccatttcaacttcaacaggcactatgccaaatgacgagaaaagtttatatattgatttaaccaatggtttacacttaccataaatattatttccaatcaatggtccaaaaattcatcatcattaatgagtttaattggttgcttatagtcaactgtgctagaacttttccttattgcaccctcttcaaacataagttttatatctctctgttgtacaatattccacttatcctgaaatgtcaatcttttatttagtaccttatattcgaaaagtggatcgatatgctcaacatatagaatcaaccgatcatgttgcgtctcaattgcaagattaaggtataataagttaaacacactgtataataacttattacttaacattttaacaatcaacattattttcctgaataatcttgtgaaaactattatttctacttccaagaattagcaaatgaaagggaaacgtataccataaagtaggcagaagtaggagaataagccaaaaagtaaagatcataatatttgaatggtaacatcattggatcctgttcaaatacttccttgaaatctttaagattcctatgtaagaataaccaaggagctacagctgctaatgtagcaaacatttcaataaaataggctaaccacttcccctcatatctattagttctttactagcaactttccatgctgtaagtgtttgcattatgaaagccaattcaacatcaagtttgagagattttactattctatcaaaaaagaacattcgattgctctttttttcagcctttatatctcttttacattgtaaacatttatctatcaataccaccgtatctttaccaaaatcatgataaaaaactgtatcaaaaatggcacttgcatggaaatttggcattggagaacaaatcccacccctttgcaagaatttatagtaatttattgaacgtggaacagtacaaaaagctgcattagtatctaatagtttttcacctccataattgataaatgtaccttcatcagttgttattaccgcttcatttgttaaaaaattaactgatttatgtgttgccattcttttagttattaaatttgttgaaattatatttaacatacatcttttatgtgtcattaaactgcattttgaacatggtttaaccaatgggttttcaatcgacccatcatccagacagattagcacaatgatccattagataacatgcatgaaagaaacaattttgcataaaggatataaaaatggaatcactgcaaaaattcatgttggcatgctcattgggtttgtgtgatgaatcaatctcttgtatcttttacaatctctacatctctacatggagtttcgttttaaaactaacagtgatgctcgtattatgacggcggtagatatcccgtatcccgtggatatatcatgcattctttgtaatagagcaactactgatgcaactaggtttaattgttgttcctgcgcagccacatatcacatttcatgtgcaactcataattcaaaatatgtaattgaaaatggaatgaatgctacgagttattatagtatacataatataaagaaatggataaatgctatatatgaaaaacccaacactatgaaactcactgtatctaaaccaagttttgctcaaattgacacatacatacaagataaaatatctttacgagtaggatttattaatccaagatggccacgacggaccgtttagggatttgctgattttatggaattctgggtttactgatggttatatggttagatgcaaaaattgtggtcataatctagagttttatggtaacaattccagatttttaagcattgacagattttttgacttcatcaattcagcttgttatattgtaccaatagctgctatgggattgggctatatcagctttatctttaatcacaatggcaggggttttgagtatgaactttggatggtttcccgatattatgagagatgagcctactgatttgaatatattgactcttctgtttgtaccacatacgttttactcattagtttcatcaaaggtcagctttttcagtctattatcatcatgtgtcttatttcaatttaatatgggtatacctattgtaggtataacattcacatattaaaaagtttagtacaatataagattttggctaaactcatttatcatttaacatttaataaatattattatgaatcatttatcgatacaccacctgctctttatggagtcaaattaagaattgaagatgcatgggatattcaatattatagaaatcaatatcaagaagatgatattgcagccaatacaagattaggaatttttgggaaaattaagaaatggtttaagacacaatatttactattaaatgaagacttcaagtacttgtatgaactaacatcatgggattacttctctcagtatggtgatacagtatttgcattaacttttggatacttgttccgattcttattacttcctgagaatatctatttaactgagaatcaaaatattgcattatcatcattaataggatttggagtttaccaatcattatattttatttactctaattacaacgcatgtgcattaactagatgttataataatttgaattttacttcaaatgttagagacaatgaagctaatgatatgacaaactttatttatcgtatttgcggagttcttcagtttgcacattgattatataactttatacaaaacattaatgatacagtattataaaatcatttctttcttgaatgtaaaactttaccatttggcaaaactatcttatcagcatcatgtttgatttcaggtttttcaaaaatcggttcatcagatgattcagtttctttttgtggaattgattttgaatttgatggtgtagatgcaggtacaaatttaccaagtgtaattctccaaaagaataatatcaacttaataacaaaccaatcactgaacctaataacaccatcatcttgtttaaattctacaaatttatcaacaatagaggaaacatcagtattattattcttatctaaaaatctcttttcctttcttgttcttttctgtacaccatatagactaaacataccagaatcaattatctttgttacaaaatcattcatttgttgttgatcatcgacattaatatcatcattattatataacaaaacagttgaatcaggtttaacaataaaaattttaccacagtaagtaactagtctatcatcaacgatataattagttgatatattactacctaattcatagtcatcaggtaattccattattttattattgttaacatcttgtttagtcatattatcagctttccatttaacatctcttaaaatttgattaactctcttatttgattgagatttattcattttaagcattaaaaattgcaaacctgaaataacaactaaaataaatgatgcaattaaaataaaattaggttttgatctattttggaaaatatatcttgatcttgatttatcccaaattgggaatccattcttgacaaaataatcataattcttacgacgttcaacatcacgtaaaattgtcattattaatgacaatgactcaaatttcctttcagctttcttacgttccttaacatctgcacgtataaatttatcaggatgccattttctacttaactttttgtaagctttctctaattcctcatcactagcatttttttcaactgataagattgaatagaatgtacgttgaggattttttgtacccttaagattctttggttgaagtctatgatgaagatctataatttccaattgttgggcagtaaaatatgcccaagcggttgatacaaatatgaacaggtatagtatattaaccctcataagtgttatattgcgtatatgtctagaagaaacttacgtgttaaattgcatgataattatggagacatgtaaattttcatgatacccaccgcgtagtaagtaaattgatcaacagtgtttattattataaattataaagtgtttattacaaagatcaagaatatactacatagcacctctaactttttgtctattaagttgtttcttttgctttctttcttgttgtctctttgaaagtttttgttgttcctctggagttaatgaagctctaagtttcttttgttcttcaattttcttttcatttaactcctctctcttgagatcatctaattgtttctttaatttattatattcaatttctctagttttcttaacttttctagtaagctcaggtctaaatgatgaacgattaacaattaaatcaagataatcattaataatataattaactaaattagagattgattcaatagttttatcatttgatgataatgataattttaagataagtctcttagttggttttaactcagcaattttagcaggtttttcaattggttgatcagtaattgctaaaaatttaagagttgataaattagaaataatattatcagataattttttagtaaataaaacatcattcatttcaggaacttcattcatgaaaacaaattgatttggtaatttatttgattcagttgttttagttaatgaaaggaaataattttcagttctaaatttatccattttatcctttgtaacaattgcccatataaaattatcgaatttttcacttgcttcatcatcaaattgaaattccaaagtaacttcatcagttggagttggaattgaatcaaagaagaatgaaacaatatattccataacccacataaagatattatttctcatttgtaattcaattttagcaaccattgatttaattcttaatctaccagatgcatataaagcataatgttgaccatcatcttgagctataagttgagaagatgtaacaccaacttgatagaaattttcctttaaagttggtacaattgaattaacaaatttatttgcaattttattattataggaagcaccaattttataaataatgaaataagcaaaaattgcaccaactgcaaaaatttcaattttccaattataaattgaaagtctctgccagagagacatattaacaatctcttcaatagtgtaatcagagaatgatgacatggttgttttttaaaaggaaatagatttgaatgaaagaagaatggacgttcaaagtgaacgaaaactgggaaaatggtaatctgcgagcgagtaaaatagagaaattggacgttcttagtaaatatatatacggtgattatatggagatatgactgtatgattatatgatataagtatgttgatgatatatataagtatataaagagtaggatatatgatattatgttatattatattatattatatcaattattttgtacaagtattagtaatagtattaaagtagattagaataaagacgttttctattttgaaccaccagataattcaccaacatctaatcttgaatttctaatataataatgtctatttcttggtttataattagcaggtcttctaacaatatctaatctaataatatttggatggaaaacaggtatattcatttcaacacctaaacctgtaattttatttcttaataaaattgttgaattaagaccagctcttttaaccattaaaacttgtcctgtaacaggtttttgattcttataaactactgtaacaatatcatcagctctaattctttccttattatgtaatgataatgcagcttgctttgcacctgatttatcaaattttgcatattgagattgtttaatatgttccattaaattttgtccatttcttaaatttggaagtggagcataaactaccattttctttgcaagagcagtacgtgcacaagagaaagctctaaccaagttcaaactcattgtattgtctattattctataccttaaaagaggaacctatatagtaaacccatagtaatcttacatagaaagttgaaatttttgaaaaatttaactatacatgtttacgtaatcagtccattatacacactatagaacaccaattggcaggtcaataggtttgggttgcacaacatcttcctttgctgcccatacatgtactatattatcatcagaacatgatgcaagtagccatggagtctctggattaaaggcaaaatcattgactccacctgtatgacctccatgcatcataagtaattcaggtacaccatcctctgattcctcttgtgattgttcctctccaattttatttaaatcccataaaacaactctacgatccatacttgatgatgcaacaatattttcatgaaatggatcccattcaacatttgtaatactatcattatgtccaactaatacatgtaattgttcatccatttttcttaaatcataaatataattattagaatcttcactaccaaacataattaaattttcactaaatggtgaaaatgttaatgaattcataactttattcatattaaccttcatatgaattttatcgttatctccaagtataaattgagaatcttctccaacactaccgaaaataccttttttcaaatatgaaaaacgtacatcattaacataattactatgttcatctccatatacacgtattggtgttgattgtttagaataatcccaaattgcaattgatttatcctcagatcctgtaatcaatgaatattcattatttggatcccatgaaagcccaaatccattttcactatgatgttttaatgaatgttcctttgaaatattcattttctcatcagtttcatagacataaacttcaccatttgcattaattgatgcaaatttcctgttatcaaatggattgatccttattttattaacttcaatattttgtttgatttttttactaattttcaatcttgaattaacagtctctaattcatttgatgttaatttaatttttgaatcaataattgaacgtggtaattgcattgatgcaattttaataaaatcttcatcttcaccagatgaatgtgttgttaataataaattacgtgcaactgaatatttatcatcctttgttttattaatgaatgtattacctttaaaaaattgaactgataatgatggccatgtaagtgctgtttcactaacaaatgaatacatgtatttacaattttttctccataatttatattcttcaacaattgtttgttcctcatcaagttcttcctcttgttgttgttcaggatcatcaccatcaccatccccaccctggcctgtagccatatccaacaatgtctctgcaagtttagcgtccattaccaaaagaaagaggtatacacacagaggtaaactataagattgactctctaatactcgctaatagtgaaatttcactttattacttactactattactattcgaataaatgttcatgtactatataaagaaagtcaataaataatcaataaaggaattaaataaataaataaacaagtagtgagtcaattaagattaaaatttaaagacttgtgccttattataacctaattcaccaagaataccggtaacttcaccttgatcagatggtgaaactttaacacctgaaattgctttatacattggtggtggaccacaaatgaaaatatgtgaagcatctgaaggttttggtaaatttttttcaataacttccttggtaataaaaccttcattaacatttgtaacatcctttgaatcaccaattgaatcaacaaaatatttaacttggaaacgatctggatgtttttcagctaatttatctaattctgattttaataatgtatcttcaacagattttgaaccatagagaagagtaattttagttctatctgaatcattctttaaaacttcatgaataacttgatacagtggtgtaattcctgtaccaccaccaattaaaccaatttcttgaaattcatttggtgtccatttccatttaagaattggacctttaaatgctaatgtatcattaacatttaattctttgatatgtttggacattttaccattttcataagttttaaccagtaattcaaatttacccttatcattaacatcagtaattggtgtataaggtctaacaacatttgaaccctttggtgtaacatatttagttaagattcgcagaagcagtaactaaaccagaagtttgattagattctgggaatgcaaatgtataaattgaagtatcatgtgaaactggtttaatattagtcagcttaagatcaatccattgaccatcaccttggaaaacaggtggataaactgcaattgcagatttatagtaaaaagcaccaccggcaagagcggcagcaggaatagcaaacttaaagatcttagacatagctgttgttaattgaaaaagaagcaagaagtaaaagaaaactagaagaaagaagtagtggaaaggaaaggaaaaggtgggggttacgttgagaaatttatatctttttcactgtggctaatgatggttatgaagtggttgttcttaatatcttatatagacaatgatcaaattaaacaagttattaccaccattactaccaagcttccacaagggtcaattgggtagattggccgtcattggaggttgtgaagattacactggagcaccatattttgcagctcatgctgcaatgttatccggagttgatttagttcatattgtttgtgattccgatgctgctaatgtaattaaaacctattcacctgatttaatggtacatccatatatgttatctaaaaatttagatggaattgatgataaattgaaaaaaattcaatcattaattgatagaatggatgttgttatagttggacccggttatggaagagataataaaattatgttaaaaatgttaattgaaattatacgttattgttcaattactaaggagaaaccattaattttagatgctgatgcattatatcatttagcaatgaataaatgaaattcaaaaattattaattgattcagataataaaaatattataattacaccaaatgtaatggaattacgtagattaagggaaaatttacaagatgattcaattggtaaattattaggtgttacagttgttgaaaaaggtactaatgatataatcagttatcatggtaatgaaccagttaaatgttcacaacctggtagtcttaaacgtgttggaggtcaaggtgattcaatgagtggtatgattggtgctttcattgcatggtcaatgggtgcatataaatcaaatatttatgaacatgaaattgaattaaatgatgaagaattaattacttattcatgtttagccggttgtacaacaactagattggcaagtcatttagcatataaaaaatatggaagatcaatgttaacgagtaatttacatgaatttataccacaggcatttaatgatttataataaagtttataaataaataactataactataactatagctataactataataatagctattaggaatctcttttaatatgggaaagacctaaaaagattgataattctttataaagggtatcaatagtttcaggtgggtattcatcagctgatggtttaaactcaacatttggtgatttaactttaccttcaataaaagcttgcattgcagctctctcttctaaagttggaggtaataattgataaaatgaacaaaggaaaataattgtatcatcagatattgcagcaaaatctgcaattgtctttgggaatatttctttatcaggtaaatcaccatctaaatttggtaaaattataatttcatcagtatcattcgataaatgagcatttgcagttctagatgatgatttttgttcaagtaaattaagttgaccctgtaattcaccaactaattgaactaaatcttcatttgttgcataatctgtattatccgaattagggattggatcaggtatttgatttaaatctttacgagttgatgaaacttgtaatgaaagaacttgttgtgcagtctttgcaagaagtttagcctgtttagctaattgacccttgatatcgtccaattgttcttgtgttgacattgtctatagggaagaaaaaagagaacctaaaaagaaaagaagagatattaaattgccgtttcaatttgataacatgaaaaaaatcaacttttccactattatgtttttttttatactctgtttttaatctgttttctctggtaaacacatttataatgccattaacgattatatcaggagcatcacagggtcttgggaagacacttgctgataaatatcatttacagggacatgatttagttttattagctcgttcagctgataaacttggtgaaattgcaggtagtcataatagtacaccaattagagaaggtcaaacaacattaccatatacaattgatttatcaaatattgatcaatgtaaaagattaggtaaatatattgaatcaaaagattttaaaattgataatattatatgttgtgcaggatctgcaattccaaaactttatcaagatttaacacttgaagaaattgatgatggtattaatacaaattttagaacaactgcatatttacttcatgaacttttaccatatgttattgataaaggtcatatagtacttacatcatcaacagttgcattttatccattaccaggatatggacaatattctccaatgaaatgtgcaattagagcattagctgatacattagaaatggaacttcatccacgtaaaattcatgttcatacatttttcccaggtaattttgcaagtgaaggatatattaaggagaatgtaagtaaacctgaaattactaaattaattgaaggtccatcaactgcaatatcagttaatgaatgtgcagatattttaattaaagaaatcaataatggtgaacattatattcatactgatacagttggatggttattagcttgcttttcacttggattatcaccacgttgtaaatggtatttaattccattacaaattataattggtatattgggaacattattatcaagattaataaatatttatcatcgtagtttagttgagtagtgtatgtagatatatctatgtagatatatgtgtttatatagaaataaaaagagagagagagatatatatagactaattagaagattaatttagtttagattaattgaaaagagaagcaattgcagcagatgttctttcgcctatacgcatattatagagagcaccaaaaccctttgatacttgttcattccaaagatcttttgcaccttcaattatatcatgatattcatattctatacgattacttacatgaggtacaggtacatttctattattccaataacctaaggccgcttgagattccaaatgaacttttgcagcatttattctaaacataccagcggtagcataagttagtccaaatgtgaccaatgcaccagctataagtccttgaccgacacccattgtgtatagagatagtatatatccctatataagttactacagaaaagaccagttccactataataataaaatctcagtgagcgagaagagaaattttgagttttttcacttggtgaacttttccaacattgaaattgaaattgaaattgaaattgaaggttatattattctagaggaagtagataaatataatagacaaggataatatagagatgacgcttggtagaaacagtaaacaactcaaccacactttgagaaacttggtctcttcactcatcattcatgaacatattacaacctacacctgcaaaggctaaattaactgctaattatattgaaaatttaattacaaaatcaaagaaacatgcattaaataatacaacaaaggaatggaaacatttacttcatggtaaattatataatcaaaaagatactatacctaaaatggatttatttgttgaaagatattcaaatagaaatcatggttttacaagaatgcttaaattagatccaagagttggtgataatgcacctcaagttgctcttgaacttgttgataatgaaaataaagaattattcttttggtatattgctaaagtagttgcaagattagaattacaaggattaccattggatgatttaactgctaaaaatgttagtaaagtaactaaatataaagtaaatggtgaagaaaaatttgctgaattagttaaactttgtaaaaaggaattctttattaatggtgaaggtctcgaagattcaaatgaaattgaaattgatacttgaaaatgataaattagatattattccaactcctttagaaaataaaccaagaatgaaatctaatactaatggatttaataaacaaacaaagaattttgtagttgttccaagatcttaattttgttgaaaatttatgtgtgtgtggattatacatattatgcttgtatttagaattatttaatatattatataggaagtatatgttgtttatatttgatattatatataatatatatatgaagaaaagaaaagaaagtaatttcaaatgtactttcaaatactattaatagatgcattattaaggaacttgatttgatttaaaagcttaatgcctttgtcttttcataaactgtaaaagtatggattattaatattttcatcatcatttaaactaacaatattattttcaacatttatctttaattcattacttttattaataatttcatttaatttgtttaaatcacataaattactttcaacaaatttaaataattgatttattgataattttttgtaaatttttaatacactacgaataattaattcaataatattattaataaattcatcttttgataaatgattaatgaaaaaatcaatttcaattaaaatttcaatattatttaaaatttcatttaatttattaaatttaaaatcaataaataaattttgaattaaatttgtaaatggatcattatattcataattttcaatttcaactgctttaataatatcttttaatcttttaaaatcttttgtatataaaactgatgaaataatatatcttaaaatccatggacatgaagcttcaattgttgaaatatatgaacttgaaaggaaaatttcattcatatttaataattgtaaattaatattaccattaattgattgtttctttaaatcattttcattgaaaaagataaataatgaattatgaattaaccaatttcttaattttaattgatcaattgatgaaccttgataatttctattatcaattacatcccttaaattaatcatttcatttttagcttcctcaatatcaccacttaaaatatcactaataaatttaccacaagttgcctttaaaattaaatcttgattaattgataataatttaaaattatttaataaatcacttgccataacataatcacctctattatattgtaatttaccaaatttatataattctaaaattttatcatcatcaattccacgagttttaattaattctctattttcaattttattttgttttaaatttgattgaatctccttagagcaaagtatattaagagtttcctttgttgattcatttaatggtactaattcattaataatatcattttctctatttaaatattcagttggtaaatctttttcattaggattaatagatagatataattcctttaactcctttgtcatataagtatcctttaaaacattaaattgtaaattatcaacttctttaacatcataaattgtaactaaattatctaataaagggtacattaaatgtctatcgacaaaatcaaagaaatgattagttaaatcaaatttacgtgccagttctatttgtttagagtccatccttgtacagtgagtgtggtatatctagttaactctattccaatccaatccaatccaatccaatccaatacacacattaaatcttaaaattcatgaaaacgatgaaaaatttgaaatttttttcatttctcaccctctctcgcaaaataaagaaattcctctctttttcccattttccaccaaatttccgaagacattgacttatgattgtaatcatatcatcgatcttatccattgtttcatcatttatgattgctgcattattctttttcttttagaaaaccttcatttatacgtattttataacaacaattgcatttcaataatcgataatggataatcatcatctcttaaacaattcaagaggttcagtatctcttaatttggatcaattacaacataataataataataataatacctcctttcctgctcagacaactgatcagctgttagctatttctcaagctcaagcaaatgttcaagctcaagttcaagctcaattagccgctgaagctcaaatgcaagcacgtttagaagctcaagctcaagcaagagctcaggctcaagcacaagcacaggcacaggcacaggcacaggcacaggcacaggcacaggcacaagctcaagcacatgctcaagcgcaggcacaaatgcaagcacatattcaaatgcaaattcaagctcaagctcaagcacaaattcaacaacaacatgatcaacaaactcaattacaaaatcaatataatttattaaataataatttaacaattgaagaagagaaacaattagaagaattaaaacgtatgccatcatatcaagcaattattcaaccaaattatcaattattaacaaaaaaatttacaggcgaaaacttattacctcaaagggatacatcatcaaagggtaaatatcatttaaaagatttccaaattatgagaactttaggtacaggttcatttggtagagttcatttagttcgtagtgtacataatcatagatattatgcaattaaagttttaaaaaaacatcaagttattaaaatgaaacaagttgaacatacaaatgatgaaagaagaatgttaaaattagttgaacatccattcttaattagaatgtgggggacatttcaagattcaaaaaatttatttatggttatggattatattgaaggtggtgaattatttagtttattaagaaaatctcaaagattcccaaatcctgttgcaaaattttattcagctgaagttatacttgcattagaatatttacattctcataatataatttatagagatttaaaacctgaaaatattttacttgatagaaatggtcatattaaattaacagattttggatttgcaaaagaagttaaaacagttacttggactttatgtggtacaccagattatattgcaccagaagttataacaacaaaaccttataataaaagtgttgattggtggtcattaggtattttaatttttgaaatgttggcaggttatacaccattttatgatcaaacaccaatgaaaacttatgaaaaaattttacaatgtaaaattcatttcccatcacatttccatcctgatgtagttgatttattaattaaattaattacacctgatttaactcatagattaggtaatttacaaaatggttcaactgatatacgtaatcatcaatggtttcaagaagttatttgggaaaaattattattaaaagatattgaaactccttatgaacctccaattactgcaggtgttggtgatacaagtttatttgatcattatcctgaggaacaattaaattatggtatatcttgtgaagatccatatgcaaaatattttacagaattttaattaatagtataagtactaagatttttaaattttaattttaataattataataatatatttttaatttttaatatatacaagtttaataagatttatatattaatttaactctctattcaagtgaaacttttgcacctaaaccttctaaagttgccttaattttttcagcatcttcctttgcaacattttcctttaagacttttggagctgcttcaacaaatttctttgaatcaactaatgaaagacctaataaacctttaacttctttaataacctttgcctttgtcttagcatcaaaactttcaagtttaatattgaaaattgtcttttcagctgcagcttcaggtttttcagctgcttcctcagctacaggtgcagctggagctgcagatccacctactgcaaaactcatttctggaatatttaattgactctttaattctgaaattaatgatgaagtttcaattaatgttaattttgaaattgaatcaacaattgtttgaatttttgcatcaactggtgcagatttagtttcaacagctggtgaagcagttgaatttaatctaatacattgaaatctattaacttttaaagttcttgatgcagttcttaaagttcttgatgcgtacattgtggatgattatagtctataaaagtatttccaaaggattgcaatcttaattcattgaaacttcactataggaaatgtccaattttcatgaaaaaaaagtgaataccaattgggggaagcaaaagaaaaaaattattaagagaaataagaaaaatagtcgcgacagtcgcgtctggagagtttcttttattttttagcttgtcacttttcaacatgaatttgaaatatcatcgattgattgaaggaaattgatacatgttaataattttgaacaagtggttaatctacaaacaagaccactctctatttactatttactatgtcattcaagttctgtgcagattgtaataatatgctttatccaaaggaagataaaactaatcatagattattatatcaatgtcgaaattgtacatattcagaattagcagattcagctagagtttatagacatgaattaattacaaatattggtgaaactgcgggtgtcgttgatgatattggtagtgacccaaaattaccaagaagtgataaaatattgtccaaaatgtcataataatgaatgtgtcttctttcaatcacaacaaaaacgtaaagatacttcaatggttttattttatgtttgtcttgaatgtaaaaatgttttcagaagtgatgtatagtatagtatagcatagtttgtatgtatgtatgtataaattttaaaattaaaaaaatgggatatataaattggtggtaatctctgtaatatacaaaaagtaagtggcacaatgaaaaagtgtagatatagtgtataaattatataaagataaaatttatataaaagatagtgacaatgtaagtggtaaagcagaaaaaagctaaaataaattgatattatatgtgattattaaaattatttattaatgatcaagagcatttgttaaagatttttttggtaatgaagtatcaagcattgataaaacattacttaaaatttgagttttcgaagaatcagatattgatttttcattttgaatattaataattgaagtttctattcgttttaataatggagcagttgaagtatttgttattggaatatcattaggtaatgatgatgatgatgatgattttggtaaattattactattattattattactcttaggtgtggctgtagtaatttaattttttttcaacgggattaaggatatgataaattgaggatctttgagagaattgaatcatttgttggaggagatggaggtggtgatggtggcataatcattttatttaaatttatatttgaatcaatatttggaacttcattaatattaatattattatgatgtaaatgatgattatgagtatcattaacgacaactatagtccataattttagtctaattgaataattagcgcgtattctaaatggacaaggtattatcggttgttttttattaggttttgaaatagaacttactattatttgatgatttttttaaaatttttttatttgatttaaatttacatttacatttgaaaacaatttttgaatcatcagatcttgcaataacaatattaataccactatttgataattttaattgtaaccaaggtttaatttcttgttttgaagtaaatgttttaccatcaatttctattggtgttttgattatagtattggtattagtattatgagtattattattagtattattaggtatagaatttgatattgggataatagtattatcccttcgttgtaaagttgtagtggttaacatcgtttacgtaatgaaatggataataataataattaataatactaaaaataataatacagcactatcttactaaacctagggcagaggagaaagtaataccctttatataaattaatccactctgagattaagataaaaccagggaagttcaaaactccgcagaaagtgggggtccgaaaataatttgaaaatttaaaagttaacttatattaatatactaagtaaatttactgaaaactactgtaaagggttaaaaaacggactccgttaattacggacaccgattaaaaatttaaaaatttaaaatttcttaagggaaaatattcttatccgatacgggaaccgatggtccatctcagtaattatatccctcagcttataatataccccctccctatttggtaatttactaaatgctaatagcttgtcataatattttctatgatgtatctattacttggtaattagtaattagtaattagtaattagtagtgagtaatgggtacgagtcttttaaattgccgatttatttatttattagttgatattttctccaattacgtaataatcaacatggaggctcatttttattattatgattattattattattctattttaactaaattataatacaaataaaatatttatataaaatatttaataattaatattaccttctaccacctctactaccacctctactaccacctctaccactactatgtctaccattctttgcaattctcttttccttaagaacacgtgattttctgatattctcacttgaacgtatctcatccttaactttattaccaactctttctttatatttcttcatcttaacttcataatcatcacgtcccttttgtggcatctttggcatcttattttgaacatgtaatgctctaccacctcttctacgtcctgttaattcatttcccttatcatcacctaaactactattattattattaactctattaccatttgctgctttccatgcctcaaatctaccactacgtaaacttgcagcaattctttgtccactttcactaataatatatttcttatcatcttgtttacgtacatatttattcttctcccaaaccattttggcactattacctggtcttctatccttaccttcatcatcaacaattccaaatcctgcactatctgcctctcttgcaaatcctaattccatatcacgcatttgttcactcatcttcattattatttggtgctgtatatgacatataactactctcatctctatatttcttaacaatttcatccctattctcatcccttctaccaatttgattattggctcttctctttcttaattcctctccaacaatcaatgcatcattacgtcccttttcaccactttttaacatttcaaaaatactttctttattctttctttgtccaaatttttctaataattcttccttttcaatctcttccttatcaatatctccaaaaattaaattaactctatcccatccattattaattaattcttttgcacgacgtgcactctccattgatgctccttctctagattttaaatacattttttcagctttagtacaaacacctttaatcatcttaatatcataatcatgattaagtatattctcatataaatcttccataacttcaattttactacgtggaatactaccaagtactaatttatcattaaatttaacatttttataatccccatcaattataatctttttaccaataaaaacttctaaatcaaataaatatggtaattcaccttccccaactaatgaatatgcccaacctttattaccagctctagctgtacgtccaaccctatgaataaataatttactacttgatggtaaactataattaataacattagctaaaattggaatatcaatacctctagctgcaacatcggtaacaactaaaatcttacttaatccacatctaaaattatttaattgtctcttacgtgcaatttgatctaatgaaccataaatatatgaaactgcatattgtgctttttcaaggattttactaatatattcaacatgatgtttagttggtacaaaaataattgtagaattttcatcaggtaattcatttgactttgctggtttcataaaagttttcttcttttttaatagttttttcttatgatctgttttaccattattttcttcaaattcttcatcttcttcatcaaattcatcattaacttgctttaatttcttaacttcttcctcagttgcaactggcatcttaattaaatcctctaaaacacttaataaatttgcttcacgttcattctttttaatacttaaaaataccatttctaaatcttcactcattttactctctgcatctaatctaacaagtacagggttacttaaaccctgccttagcaaattcaattaaattctttggtaatgtagcagagaataataaactttgtctcttttctggtaaacttgctaataattcatttaattgatctgcaaaacccatttcaaataatctatcagcttcatcataaaccataaattcaacattacttaaatctaatctcatttcaactttcaaatgtaaaaatctaccaggtgttgcaataacaatatctggattactcatcatacttgaaaattgatcatctaatgaatcaccaccaataactaataagcttcttaaatcactacctttactaaattctttaaaatttttatatgtttgactagctaattctctacttggtgataaaataatacatctaactcctcgttttgcactatgtgcttttaatttttcaataattggaattaaaaatgcagctgttttaccactaccagttcttgccataccaactatatcacgtccactcataattaatgggatactcttacgttgaattggtgttggttgtcgataacctttcttagaaattgctgaaactaatgtcttattcaatcctaatgacccaaatggtcctttaaccattggtttattcataataatttcatcatcagtatcatcattcctattaccacttcttgaattcttagtttcattatcatcatcatcaagttctaatgatgggaatgctaattgttcaactttcttagactttgatttattctttgattttgtttcagtattattttctggaataatatcaatatccatacttgcatcagctttcatattctgattcactcatactaatatctccccgcatttcctaataaggatgggagaacattgtcatcttcactatcactcatcttgcttactttaaaaaagaagttattctgtacagttcttagcttttacagtgataaatttatttttacctaaaaaattttttttaaaagtgaaatagatgaaattttttttatcatttcttacgtaattttatttttatacattgcaacaaactaaactaataactcatctacggtatggatggtatccaccacttcttttaccaccacgaccaccatacttaccactcctacgaccactacggaatcctccatcttccttttcacgtaatttctttggtccagatggtaaattattaaatctatcatcatcctcataatctgccatattaccaccactacttccacgataatcatcttcatcatcatatctacgacgaccgaatcctccaccatttccacctcttctatatccaccactaccacctccacggcgtcttctacccccacgataatcatcttcatcatcataataatcattatccattccactactaccaccatttcttctatcattgttattaccttcacgagcttgtggatttggaacatcatcatcttcgtaacctccgttattaccattattgtttgaatacatatttaattgtgcatcttgtgcatttggtgacatataattttgattagaatcttgttgaccattttgatcttgtccattaggattttgtccaccattttgaccttgttgttgcatctgcatccaatattgttgcatttgttgcatttgttgcatttgctgcatttgttgccaatattgattcataccaccatatgcattattacctccattcatattattattcatattaccataattattcattgggctattagaattattcatatttggtacagaactatctaatacacgaccttgattctttaaatgttgatttcttggctcagctctcttaatttccatttttttaccatgaaacataacataatgatgtcttgtaactctttcaactgcttcagctgaatcatatgtaacaaatccataacctctggatttaccggtatctttattaatcattaattgtgaatcaataattgaaccaaatttttcaaagaacattctaaattcttctggtgtaacatcagctgcaataccaccaacgaaaactttaccaactttttcttgttcatcttttggaattgctctttttggatcaattaatttaccatcaagaatatgtttttctctcataactttatcaactgcttcacctgttgaaaatgttaaaaatgcaaaacctcttgacttacctgtattgttatcacgcataacgttaatttcaataacttcaccataattaccaaaatattgctttaatctttcttcatcagtttcccagtttaatccaccaataaataatttaccaacatctttgttagttaaatctgccttaacagaatcttgaatattagttggtgcttcaatttcattaatatcaggaatgtgctcattggattcttcctcattattaccattattaccattagtagcagtattattagaattggttggtgtattaacatcagatccttgtcctgacatttgaccttgttggaattgttgaaattgctgaaattgtggcatcattccttgcataccttgcatacctggcatcatacctggcatcattcctggcatcattcccggcatcatacctggcatcattcctggcatcataccaggcatcataccttgcatcatatttggcatcataccttgcatattttgttgttcttgtgttgtagcatcggaaccattattattaacattggattcttgttcaactgaaccttcattagtattaatttctgtaattgcattagtatttgcattgttagatgcatcattattatttgaattttgattttcttctgaattggttactgttgattcataagtagggtttgaatcagttacagaagattgtaaaggttgttgctgttgttgttcagtatttgtagctgatacagacgcagttgcaggttctgaagtagtttttggttcagaagcaggttcttggttggcagttgttgcagagccaacagttgctggttgttcttcagcataaatatcatcaaataatgcttcttcgtcgtcaaaattggacattattaatttttgtactataattgtgtgatgggagtagtataaatataactataataataaatgactatgaaactaagtaagtaaataatatattttatagataattattaattattaatttagatttattaaactattattaatcgggacaaaagtcgaaagctttatgttattatttagaatgactttgtttatttaaatttttttaaattttttaacttttttaaacaatttttatctagagactatactgtgaactaaaaataaactatagctgatatatgtataaaaaagagacttctaatgtagagctaaaactcacgttaatgtaagatgacttgtcttgataaaagaaatagaaaagagaaacagagtaaaacagggaagaagaagaagaaagagccaccaacacactaactaaatctcttcactttttgccctccaaaaaccaattttacagaacgagaattgttgaagaagcgaaaatatttttttattttgacattaggagagagcatgaaaaattatttttaaagactgattatcgattctaggtaaaatggtgaaagataccaagggaaggagtgtacataggagatgaaagattatataatatttttagcacagagtcatcctcaatttagaaaagctgaattagaatctttagcagatctatacaacataaaggcagatttctctcaacataatgaagaacatccatttttagttgttcagttggaaaatgatgaagaagcgtataatttaattgatcgtgctatcctaagtagaggaatttatgaattatgggggcatggtgttactatcgatgaattacacgaaaatgttcaaaaaaatatggggaaatatattgataaatacattgaagatacaacatttaaatttgaaaatttaactttccaaggtggtaaaaaatcaagagatgaacaaattaaaatgtatgaaagatttgcgtatttagcattcaagggtaaaattaaaatgaagaatccagatgaagttttcactattttggaaaattactcattaggtaaagatttatttccattagaacacccaaatcacttatggtttggtagacaaattaatataagtgctagaagtagaggtgttgttgaaaaatatgatataaagaaaagaccatattttggtacaacatcatttgatgcagaattatcattattaacaggtaatataggacaagttaaaaagcatgaattaatttatgatccgtttgtgggaactggatcatttttagttactgctgcagaatttggtggtattacaattggatctgatattgaatttttaacattaaagggtaaaggtccaaaacgtaggttaaaggataattttgattattataagaaaccattacaatttactgatgtcttatgtatggattttacaaataatgcatttagaaataatttaaaatttggaagtataatttgtgatccaccatatggagttcgtgaaggtgttaaagtttgtggtacaactgatgataaattaggtagagagaatatagtaattgatggtgaattggcatatttaagaagagattatattcaaccaaagaaaacatattcattagatttattattagatgatctattagaattttcgagtgaaagattggatattggttcaagattatgtttttggatgccagttgcaaatgatgaagatataccaacactaattcctcaacataaagattttgaattaatttatgaattagttcaagatttccataaatggtcaagaagactgttggtttatgttaaaaggggcgaaggatttaatggtgttacagttaaaagtgatgatcgtgaaggtacaaataattttagagacagatatttccataaattttccgaaaagagtaaagttgtgaaataataggtatatataataaatagatctatagattttactagtttaataatcaccatataagttagattgaaaaagtgtaaaatgagagatatattacaaaacttgtatattatgtactatatagagtatttaatgtataaatgaaacgaattaataaatttgaatcaacacgattattcatcatcttcagcttctaaagtttgagctgcaatacgatctaaatctctttgaccgttttcagaaatttttctaccaccgttttcagctaattctaagacaccaatcttttctaaagcttgaacaactcttctgttaacggaacctgaagcatcggaatgtttacctggtcttggacctctgttctttgaaccaccgtaaactttgtttaatttaccaataccaacggtttttcttaagtagatgtgtcttgcaactgaagctgctctcttgtagaaccaaccttcagcatcttgtggtggtaattcattacctgaggaagtcttaactaattcaacgtaagatggaacttctaacttaccttgtctttgtaagaattgtgcgtaagcgttgatgaattcttgtgcagaaacgtctctatattaaataaaaattggaaggagttgaaatgttagtatttatgatctatttgtgatgttcgatgaatgttttgaaaattgataaatgctttaataggtgaaatatgaaagatgtcgtattttcagttgtgggctagtatcaatgtcaaattagagtgagttctgattcttagatagttcaatatttctacttttatattgtaaggtgtttaccatactcataaattcgagttgtcttattattattattattattattattattattattattattattaattatttcaaatgaacaatttacattggtattttattcaatactatcataacataaatcaatctataagttcaaacgttcaaagttgtttatctcgatgtatatctaaagggaagtgtgtacatacctaacagtaacacctggcatatttgttttggcttgtaatgaaagacttttagggtaaattcaaaaatgattaatttaaaaaattctataatacaagtgaaattacagtgtaagcactatgttgaatttctccaatgtgcaggaacaaatttttcagagcgaaacaggtgcaagtggaaaaaaaattattgtacaaaaattattgtgcggagggagggttagaaagagcacagggacaccgcactgttttattaaaaagtttgtttgtaattttttttttgctgtggttgaggaaagggcaaacgcagtcacggcaggaataagtaatattaaaatgttgagcctcctaagctgataacaagtacatttactacagagttaagactacaatatctttgataagacaatcgaatcgtacatgttaatgatgataagttaattactgtactgattagaaaagcgaagttatttagaagtatattaactggcattgtattagcctgtataaatttacacatgagtaattcaattgaacaattaacaacagaaataattagtttaaagtttaaagataataatgttaataatttaaatattaaatcaacatcattagaccttgaaacctcttgatcttctcttacctcttgctctttcaaattttctacccttagattgaacctttggagccttgttcttgtgtggacccataccaaagtgtctaacagcttctctggagtttcttggacctcttaagattaaggtgttcttaccggttggagctcttaaagctaattcatctaaagtgatagcttcaccaccgttctttaagatggttgccttagcacccttggtgaattttaaagctgcaacagttgcttttgggaaagcgtgaattctgacatcatcagtaacaggtaccgacaacaacaacaatcttgttagcagaaacttctggctttaaagctcttgcaattcttgaaacagaaacaggtggtttgttgatctttgataagaataattgtcttaagataactttgttgaatgatgcaccagttctacctataagaaaaataaattttgtaattgtaattaaacaatgagaagagttagtatatcttgcaattgtgaaaaggtattacatgaacttcattgtggaaaataaatagattaagaaataaatttccaacaaagcatgtaaatacacctttcttcaattctgctctataatcgcaccatttttctgaaaataattttagaaataagcacttgcagattttgacacttcattccaataattgaccaaaaatggaatcacccatttatacttgacagttataatagaaatccgttggtgaataagtaactattcaaagtcctcttaaaaatgagttaattatagatagcaagaatcaaagaaataaataaaatattgtgtttctttaatacgtacgtgctaagaaagagtataacttagaaagagaagctaagtagacattgtctgactttggagctgatctgtgggaactcttttcgtgaggtttcttgaagtggtctctacccattttgttttgttattggctgataaaggagaggaagaagaaaattaaaaaaaattgtaaaagagaaaatgaagaatctaatatactactactacaggtgaaaaaatgtctctttctatgaagtgcgctgaagaaattgaaaaaaatgaaaaaatttcagtgtcaaaaatgtttagttttcaccggttgagggtttctcttttataataaattttttatatgggtcacgtgagagggctggaaattatttatttattttagcagctcctggaagtagtattaaagcttatgcatgcacacatgtgcattttattgatttaactattagttagaactgttgattagatactagaatacaacactcaatggcaactgatagactgaaaactgaaatatcgaatccaagaggaatccctgaagctagatttattgaaaatatcgatgatttcgtaaatccaaagacatgtactgatgctgatgttactaatttcttaaatgaattacaagatgcgtttagaacaatataagtttatggaagaatctaagagaggaacacttgcaaatttagataaacaaataccagatatagaaaatacacttacaatgtgtaaatttttaaaacaaaaatatgattcaaggaatgactgaatgaagatgatgacgatgaattaaatgactgataacgttgatgaaaatggaaataaaaaattctctgtagattatcaactcaatgatacaatctactgcaactgctgatatacccattgaaaattgtaaatctgtttcactttggcttggtgcaaatgttatgcttgaatatccaattgatgaagctgttgaaatgttagctgaacgtttatctaaagcaaatgaatcaagagatataactcttgaagatttagatttcttaagagcaaatataacaacaatggaagtcaataccgctcgtgtctataattgggatgttcaacgtcgtaaattattaaaagcaaatgaaaataaataatatgtataataagaactactaaaagtaactatattcaaagactctttttggcaattgatcactttttatctattgaaaagtatcaaaaacttgttgtccgagcgttcttgccggtgtatcttctctactacctccttctctatcgtaatcgtcatcttcttcatattcttcatcaacatctccggtaataggttgattaggattaggaacgagcatttgtatttgtatttgcatctctagcacctgtagataaattggaaccgttattagtaacatttgaattattcactattggtatagatgtttgttccttagttaatttatggtataatggatcgataaagtttaatgaactatctgtaaatggtaataactcatggaagtataaataacccataaagtagccaattgagcataatataaaagatggaataccttcatcaattaacaaaagcaaaaatcccagatatcctaaaaatttatcgtttaatgtcaacacacatagtttcaccaaaaggtctaaagttagcaaaattactaaaatctaatcttgcaacataaatatttgggataaacttattgtaggcaaaatagaatccaaatattataccgaaatggtcctgatggtatgaataaatcccattcaaatactttataaaatgtaaatgaaatcaaaaaaatagctattaagttgtaaaggtatagcaatattattatcttgaaaatcttcaaactaccctaaaactctctccaatcctttcaacttcatcattatcagcacacatgcaagtgctatctccgattgattttgaaattgtaattgaataataagaaatcgccaatactgactccattttgaaatgaagggatcgtatgcctaacataaaatatggtttcccattgagaattgaaacgcataactggggtcgctatcactgcaacagaagaccaaactgctattggtaactgtttgaaatcccggtggtaatgctgaggtcattgtcctataagaattgaagtaagttaagccattaacattgcctggaatcaattgattaccaagaaatatctaaacattatgcgcagtatcatgaatatttgtacagaactttaatcatcgatctacagttttcttttactgaattattaaatattctcctcctctttaggatcaattattgttacgttcagagaatggcagattggacgaatagacttggtccacagggtagtcgacttttgcaacaatcacagaacttaaatcaagattaataatattaacaacttatattactagcaatatccagataccaacagaactcgattatgttcttcatgatatcgtaaatacactccctaattccggaaattctgataagataatctcatatttagcatactattatcctaaaataaagaatgcatccaatgttgaacttcttactctgaaatttttacaatgcccattatttttctgttcaatagatttgttatcaattgaaacaatgtccaaactaattgagttattccaatatattattttaacaaaatttaaaattacaaatccttcattaccattttatgaattctacacatctctatatgatgctattcgacatgctatttcagctgattcaacagcttattggaaagttattcctctactaagcggatgtatatcttcaatctcttatatgaatagatataacaatcatccacaatattcacatactatttcaaaagttaaacaagttatatattcaagcatactcaaattcattgcaggcagtttacaatatacatctcatgtctactttgcaaacaccatttactttgtccttggtttacgttcatgaatatatggatgattcattctatgccgaagtttgcactgcaaatgtttcaattatggaagagattacaaatatattatttatttccaatactggactgaaaaaaggattattattatattcagatttatcctatgatgacatattgaagagtaatcctgtattgaggtatctaaacagatgggtatttgtttactctaggacttttagagaataataggatattctgttagaagtattccatacattattggcatcagtcaataacatattcacttttagttccaacatatctaataacaatctagaatcattgcaattgaagccagacaaatggaacttgatcaagtatattttcttttcagtagtgatgatttttgaatccaacagtaaatttattatttcaggagcttgcccattatcagaaccaatatttttcattgcttcccaaatgcaacatactttgtttaacctctcatatgtgctagatcaaattggaagctggtgggtttgattcttataactttttatttgattcaacttcatatattttatgtgaaaaatctccggaaatgctacagaagttgttatactccttgttgaacgaaataccaccaactatgaacaagttttctgatgttgagacttctaagcttgattactttttaaaattggttgaaaagtcccttccttatttgaaacaagattttaaagagtactacattatcaccaatgctggctactatttttcacatctgagtcatctaaaatatcctacaatagaattatctcactcaataatgatcaaatttttagataagttgatagatagtaatcatacttcaaaagaaataggaaaatatcgtttatccttacttcgaaaatagttattctctcattttccaaaacatatttcctttcaatcaagcatcttttattataaccaaatgtgggcatgcatcaggtcagcaaatctcagttcatttttactctaatggatctgatcaatttccatatttcaatgtctgcatacactccattacctgaaaggaagatcatttgtcaatggtaatgaagtcattataccagaaaaattgtttacccgtcgtgctggtttagttggtttatcttttgatgtattacaattcataccagttgacaatttcattcgtatgttagataactgtaagagaaatattgattcacttatgggcgaccgtgatatttatacattgtatgatttgctttgggacaaaatattatcaatcaataggtttgattcacaaagaggtcaagctggaattgactggtggtatgataatgtgaataatgggattgtccctaaactgtaaaagcttaaattaactacgtattggattatttgactatataatatatacatttctactttaaaattaacgaatgataaactgtcatctattcaatttcttcaggatcttcttctcctagtaaatcttctaatggacaatttggatggataatatacactaatttcttatttaactctttttgtttgttctttctccaagttgcttgttctctttttattttttccttttcttcatctgacattgatggggtgataatcaattcacttggtaattgttcctgatcaaaatctgtaggatctggattcacacgcattaataagttatctttaacaagcttatttaaaacttttttagcaatcttcatttcttcccaatattcattgacagaatcaagttgatcttcaattgctgtcatgtaccattctaataattcagcttgcgtataacctgcaatagtatcatcttcgacaccttcaacttgattatcagtttcagcttccgtttctttatctttaatgtgttgtaagaaaatgttacgtagattaataaaaacactgtatggaatatgattagattgtttttgcttttcttgcttgatcttttgtacattgacagcatcatctagaattctgtcatcatcaatatcttcgtgatcttttgcaccatcatccttattgttattatcaccgtcatcattatcatcattatcttgatcattaccaccattattattatcagtcatcgtcattgttatcatcatcttcatcattatcatcataaacttcaagatcctctttttcaactcttataattgattgtttcaataaatcatatgcctctgcaacaaatgttggtgtgatatcatctttacaatttgctcttgcaatagcttcagataatcggattaaagattctaattgtctaactgtaattctataacttgctctaccatctttactatcatcggcacgtaattctttatatctttcaattaaataagttctagcttgacgtgttaactttggtttaacatttttagcatatctaatatatcttaaaacttgttccttggtgtatggaggatttaatgcttcatctctgaaaagatgtaaattaacaatatgtgttgcaagttgtgtatcaattctttcattacattcatcaagaataacaaaaaataaatcaaatcttgataaaattggacctgtcatacttagattgctacgtaatccaactttagcattataacgaccaccaattggattagcagctgctaatattgatgttcttgcatttaatgttgcatgaatacccgcttttgcaatagaaatagtttgttgttccatagcttcatgaattgcaacttgatcagcaatatccatcttatcaaattcatcaatacaacaaataccattatcagccaacattaacgcacccgcttcaattgtgaattcaccactctcttcgtctttaaccacactggcagtcaaaccggctgcagatgatgctttacctgatgtgtaaacagatctaggtgcaaagctattaacccattttaaaaattgtgacttggcacaggatggatcaccaacgatacaaacattaatatcacctcttaaattgataccttcaacggtagttttatgaacaccgcctagtaattgtaacaaaataccttttttaacgactttcgtgaccataaactgatggagaaatggattgaacaagcttagagtaaacatttctatcagaaaccatttctcttaattcattaacttcagattgtgttagattagataaaaataattctaatgagttattatcatcattggattctcctaaatcttttcccgacattgaactaacatgacaaccaaggaaagcaattttataagttaaatctctagcacctaatgatctcatattaatacctgttgtaagagcatcacttgaactactacctcttgtacggatagttaccgcttttataccaggtaattgatattgagaaacatcgggtaacacaatttcagtaccagtgaatttacatttatcaccaggttttgccttatcaaccaattcacctcttaaaattatatctaatgttctaggcattgaaccattcggaatttcacttgaattttcttgtattctgactttttgccaatctaaaaaatgtgatttagaaataactaatgtccaatcagattgattaacgcatgtattattgatacatgatgtaggttctgtatatttaaaagtttgctcaatatttgttatgagtgctttacaaacatcacaagtgaatgcagctttgtataattccggtctaatttcacttgttcttgtaacagttcctgatattgacattaacataccaatattttcagcttttaattctctaattctacaaactgatgataaattgtaaaatgaaatttggaaatccctgtcaacagtctctgacatgtcatcatcattagatgaagatactgaacgtcttaaaaattgtggttgatatttagcaacaatttgtcttaatgaagtttgtaagaatggtaagaatctataaaattgttcctttatagcttctgctagaataccattttgataacttaaaagatgtttaaaatcgatattcaataatgtactatcatcactgaccattttagcaactctagctaaatatattttaccttcaaaacttggatcatattcattatctgattcaccaacagtatacgactctagaaattcttcaaatgattcttgaacagtattggaaattctatcaataacttttggaacatttgagacaccccttctaacacgcatacgttgcgcattctctgtagcgcctgaacctgctgaatctgttggacccggtggaactccaccactagtcaaattttgtcttccagcattcattatatcactggttggttcattaacatcatgacgaccaagaaatgaggattgagtgttactttgttgaggtagtgttgtatctagattgaaatcacttaattgggaactaggatctgccctatgtaaggcatcctcctgagacaaaatgggagaggatgtaacatttgacatttcgtttatgaggtgctatttactgaaaactaaaaaaatacaagttaaatatattaaattccaagataaaacaatcacgtacctaataattacatgtgtaaattgttgctgtcaataatactactttaacatgaaaattatgcaattttcaaaaattgagaaaaattggagattttcgtgttaaagcgctgtttcaggaaaaatttcctttttcggtaaattgaacttttcgataagtctataaatacaaatttgtagttcacagttatatatatatataacttgtaaaaggttaaaaatatgattgaagatagacgtttggctcaacaagcagaactatttatatgaacttttttaataagtttctttatttggactattttttagcaaaatctgagttattcctgagaagagctatggtttgtttgtgtttcaaaaattgcattaattttttttaatggtttccaaaatatttacattatagcaacaatttttagagactaagactgctcaacaagatagttgttatgattaaatcttttttctcttttttctcttttttagtctcatccattctttatctttgattcatgggatatcagacatttattggtattttcctcatgatgtagttcaaagatcaatttgtcggaattttttgacttcataaaggattaagatatatatttccgaaaattttctctttagagcaggtaacccgaaagaatgcactcttattcttagttaaagaagtgtctcaattttttatagtatttattatacactttgtttcaagcctttttctcggaattactactttctttagacaatagataatattctgtggctgcgattttaataactcaattaaattgttatcaggatgtaaaactggctttgatattgataaaattatgataactcttatcaatgcggctgaaacaatttttatgcgcagttaaagaattaaaagtttcgcatagcaataagtcctagttcaaaaatactatagttttaatttcaatatcttacaatattgctaatttatacaacagagtgatgatctatttaacgagattggtatcaatatcctacatataacgaaaattgaaattaaaattttataaaaactgtaaactaaacttattaacgtagataatagaaaacccagacagcgaaaaatatcagaaacagtattctctttttgggagccattagctttatgtatacagaaaacttctttccatcgacaattttgatgtatttcttattaaatatttacagaaaaacagtatcagtaagtgcttttctgtgtgagattttgggtaagggtatgtaatgggatagttagtggtttgctattgtagttgaacaatatagaactggaaatttcagtgagtaaaatcagataaataagtttgtataatgccgtgtgtttgatcaactaacgttgtttgataatcggattgttattaggacccttagcagagaaatgaaattttgcaattaaacgtttatttttgtagctttgagattgtttgttaattagatgatgattctctaaaagtaaaactcttgggtgaagtatctaatttacaatagataacatttttgaatagaagaattttttataaaatatttagataaagaaagagaaaaaagttaagtatagtatataacgaagaatcaaaaattgtatagtattagtaatctaaactactagcaaaaaaaccagacaagaatagcacaggtaatttaacataaccagaagtaaatcttcattataaaattttttgcaacaggtggaacatatttagcttgatctttttcaacttctgcaagacctgtaatacaatcaatttcctctaatggagcccacattttataatttttataccaaatcatatgaccaacatataaaatgaaaacaataggtaatgtaatataagcagcaacaaaatcatttgcattaaaatcaaagaagacaccataaccattagtaagagcaactaatgaaaaaaagaagatactaaaccaagcacctggaatttgaagtggtggtctaaaagtaactctatcattcatattatgataatccattgcctttctatatctaatgtaaataataccaataaaaatccaagaaataaaaccagaaacagttgagatattagttaaccaagtaaaaactattgatgagctatttgaaacgtttaagaatgcaactaaaccaattaaaccagtaatcgtaacagaataaatgggaacgccaaatctattagttctagcgaaaatacgtgggacttcacctcttaatgccattgaatgtaatgttctagtagccgagaacatttgtgaattaccacaggaataagcagatgtaagaatggctgcattaacaatatgatttagtactgggatacctgcattttgaataccaataacgaatggtgaagcagcagcacctgaagcacctgcatcaattgcattcattaatcttggatcattataagcaaccataataccgatagttaaagagccacaaacgtaaaaaaatatcattctgtaaataaatcttgaagttgcttttggtaaatttactcttggatgttcagcttcagctgcacaagcagtaattaattcaggtgaaagaatgaaagcgaaagcggacttgataattgaagtccaacaagctaagaatttaccagtattaccatgagctaaatgttcaacaaaagcacctggatgtttccaataatgaaaacctagaacaccgtgagaatttggagctccaccaaagaatataacaacaccaagaataattaaaccaataattgttataattttaattaaaccaatccaaaattcaatttcaccaaagcatttaacagcacaaaaattaattgcaacactagttacccaaaaaatagcaatccaagcaccaggattaattggagtccaatattgaataacaaaagcagcagcagtaatttcagcaggaacaataagagcttgagcataatataaattcataccacaagcaaaggataatgaaggattaccggtatatctttgacataatgcataaacagtagtttgaccaggaactggaatataagtaaccatttcagcaatttgattcataactaaccaaacgacaactgataaaattaaataaccaacaagtaaaccagctggaccacaagcagctaaagcagcaccagaaccaacgaaaagaccagtaccaattgcaccagcaagagcaataatttgaacatgtcttgattttaaaccttgtttcattgaagtaccgtcgtgtttttcaattgataaatcatcattgttatcagatatatcattaacattaatttcatattgacctttttcataattatctttatttgttgaagatgaattttcatagaattcggtatttgaattagctgatgatgaactggtatcaccagtacgaaatactgatttaactttatccattttttatatgtgtgactttttgtttgatgttaaaagagagaaattttaaaaaaaatagtatagaagagatattaaatagattatgagaacaaatctacgagtggaatagacatagcttttgtacttgtgacaatgaattatttaacggtttagaaaaatttaaaagattatagcaaaaaaaaaaaaatactcaaacacttatcataataaaaaaaaaagatagctatgaaaatgatttgaagataagaaatgaaatctattaaaaaaaaaagataacaataaaaatttactagatgatcagataagtaaggatgttgtggagatatacaataataataaagggaagggtctaacaaaaaaaaattagattgcatcataaatacaagaagatagaaaatgatcagtgaaaacatattgaagatacgataattataatattgataagataacgatgcattaaaagctgataagataaaaataggaaatatttcccttttgggatgaaattccgaaaataggaactaatgccgcttgaattgcggctaattcatatttttcaatttaatgaagggtaattacatgcgagagaagtgaagactatgcgtcgatgaaacaatgctgtcaatgcggtcgattggtctgtaaattaatttaaaacagttgccatcacgtgatgaaaaaattttgcaactataaataaatgaaaaaccaccccatactaagtttactaaatttaaatttaaattcgctcaatgtgacagcaacataataaaaattaaataaccttattgttcacagagtggatatatattaattttaatattaatatacccccacatattaaaatttactccagatttttcctgttttaacaacttatagttttttcaactttattagttcgtatttaaagtcatctctttggcaatttttatgattttaatatcttttttcctatttacaccttttctttctttactttcttctctttcttttctttcttttcttgttaagtaaaactatattctatattcaattgaaattgaaattgttataatctataatttataattttatatacttatcactttctataactataatttacattcttatattattcctttcccttaatatactaattaatactaactgatttattaacacacataaacatcacacacatacacatataaaatgaaaggtcttctttattatggtagagaacaattaagatattctgaagatatacctgaacctcaaattaaaaatcctaatgatgttaaggttaaaattgcttattgtggtatttgtggtactgatttacatgaatttttagatggtccaatttttttccctcaacctggttcagtttctgaaatttctggtaaagctttacctttatgtccaggtcatgaattttctggtataattgattcagttggttcaggtgttaaaaattttaaacctggtgatagagtcgttgttgaagcaacttctcattgttctgatagagaaagatataaagatgagatcgttaataaagacttatcattttgtgctgcttgtaaatcaaataaaccaaattgttgtaaaagattaagttttgttggtttaggtactgatcatggtgcttttggtcaatatgttgtttatggtgaagatcatattttaaaaattcctgataatttaccactagatttagctgctttagttgaacctttagcagttgcttggcacgcagttaattgttcaaattttaaacctggtcaaactgctgttgttttgggtggtggtccaatcggtttatgtacaattttagctttaaaaggtcatagagctggtaaaattgtttgttctgaacctgctgcaattagaagagattttgcccttaaattaggtgcagaagttttcaatccaatggattatgatgatccaattttagctttaaaaaatttattaccagaaactgaaggttttgcaacttctttcgattgttcaggtattcaaaaaacttttgatacttcattagatgttttaggtccaggtggtattgctgttaatgttgcaatttggccaaatgtaccaattcaatatgttccaatgtgtttaacttatcaagaaaaattagcaacatggttcaatgtgttatgttactgaagattttaggcaagttattgatgcaattgattcaggtttaattgatcatgaatcaatgaaattattaattactggtaaagttgaagcaaaggatgcagttgaaggtggttttatgcaattaattaatcataaagaaaataatgtcaaaatcatgattgctccaaatggcttagatatgtgattcaaaatttttttataatatcttatacttattacttatttaacaccctttttaatgacattttatccttctctaatgcatttatatatgctttttcttatattcatacgttatatgaaaaaaaaaagaatcaactgaagtttgaatgaaaaattattcccacactaaggaaatcgccaacatgaaattttcataaattttggtgtttccaattgatcgatataatctttctttaattttgtgttaaacaccaacaaaagcagacatgtcaactgatattatatctgtattaccaccaattggaacgcgtataccgtttcctaattcatcagatacagttattttaagatatgttggatcagttgcaggtcatgatggtgtttattgtggattagaattatcgggttcattaatatcaaagggtaaaaatagtggaattgttgatggtattaaatattttgatgttgaaattgaaggtagtggattatttgtacctttaagaaagattattagttggattagtggtagtgtacatagtaataataacaataatttgagtcaaaataatagtcaactatcagtaacacctcgacaaagtattgctaataatagtatgcataatactccacatcgtaacacaagacaatctggtatgtttgatgattcacaaattcaagaattaaaggaattatataaagttacttcaagaaagacttgaatcaagagagaatgacttaaaagaactggatgtacaaattgatgagcttgatgtttcaatgagggctaaagatgcaagattagcacgtaaagaagaaaaattcgaaaactataaaaaggagaaagaaaatgaagttgaaatgttaatgaatacagtcaaaacattaggtgaaagtatcgaagatctcaaaataaacttaatgaaaaaagtaaagtaatagaagaaaatagtagtgataaacgagaggaattagaaaatgaattagaaatgttaagaaaagagtttaatcaattcaaagtatccaaaaataaagaagttaatgaattaaggaaatttgaaatgattaattatcaacttgaaatgaaaattgaaaaattaagtaataatggtaatggtaccaataattctagtgaagaaattaaaatgatgaaaattgaatatgaaaaaagaaaggttgaaaacgatcatttaaaagatgcaaatatgaaacttcaaaaggagaatgatgaattaatacaacataatcgaacaattttagaagaaaataacaatcttttgaaagaaaaggagcaatataataatgaaataatacaacgtgatcaacaaataaaggaattaaagaaacgactagaggttagagatataggtaaggatggattacttaaaatatacgttcctgaagagaaaatagcaccaagtgcaggacgaagttcattctgtgaacattgtgatatgaatggacatgcaactgatgaatgtccatatcaaaagaatgaagaaatggatttattttaagatatatgtgtctttaatttatgtaattttaaattgtaaagtagtttataaatgaaaattattattattatatacagaaaatacagattatatgacaaattataattatattttgaatctgtgttctggttgaacatagaatggagaccagatacctctgactgatttgttttgtgatacaactgtatgttttggttttgaaagttttttacccgaagcatttagaagtaatttaagtttattttcaacaacatcaatattccattttctaacacaaatttgctttgttaaatcatttgaatagttaccaaaaagaactggatgtttaccaggtttctctaaaacatgaaattcaactgatggatattgttgtgcaaatttacctaatcttaaacgtaaaaaatctcttacacctgcagatgaaccaccaaaattgcaatatgagatagtaacacgtttacatgggagaataaaagctcctaaaccattacgtgccttggatacttgttggatagcagatacaccgaccattattgttgtttaataaagaaaaactagtagtcttgaagagtccaattcatgacagtggttaaaatattgaaaatttcatccttactgagggagttgaaaaaactaggaaaattatatattaggtaaggttgatttattattattactatagagtatatatgagtgtgtcttttattgaatataatagtatagacaaacagtatgcagagaagattgttttctacttcatctagagtatggagacattatactacaacttttaaagcatcaaatttaggtcaaaatttagcaaaatatgatatttatgcattagctgagaaacccgagaataatgttgaaatggtttcaaatgattcaattgtcttttcaagtttaaaagttgttaaatcaccaaataatgaaggtatacctgtatgcgctctattattaagtaatcaaatatttgaagtttcattagaaggtacagaatttcatcataaaggtgtagttgttgaattaccttcaactataatggaattattttcaataatttatccaaaacctgaattagtagttcttggaatgggatccaaaagtaggatgattggtccaaagactaagactaaatttaatgaattaggtattcgtgttgaaactggtgatacaaaatcaagtgcattaagttatgacttattagcaactgaaagatcacctgctcttgtctcagctataatgttacctccaaacatataacgagatatcaatagtaaatgattatgatgatataatgttataaaaagaatcttgtataatagtatatttataaattcaaataaataacctaaactttaagtttgccactgagtacgaaaccataagctgccattgcaacaattgaaaccatatttgcagccatacttgcaccatgccatttaccaaattctttatcaattgaagcaactgtacctgatgcaactgctttttcattatcaccattaaaatctttatcaacaatatcccaacgttttgtctttaaaactgcacattttggtgttaaataagctaaatttgcaataccaccagctgcacttgaaactaacaatgcaattccagtagttgataaagtatatggagcagttaatgcaattactacaggtgcaattgattgagtagcaaattgaattggtaaaactgctccttgaaagtcgccaaattgacgacgtggtaatgtatcaagtgctttaattgatgcaataaatgaatggaaagttgtggatcctaatgtgtatccgtatgtaagtatatgtattggaagtaataagcccattgtttggttagtagaggagaagaagagattaaaaagttgaagcaaaaaagtggtacaataagtatataattgattcccaatatggttaagtgaaaataataaatgctctgtacagtaattccgatatgataaatccatttttcatgtatttatttacatggtttataacttgatttaccagctgctttaagtaaaagattgaagatttataaagcctaaagtacataatatgaaagatgaaagattgtaaactcaaaaaacaaagaagtagatgcaaaaaggtaagaatttgacgattgataatgaataaatgtatgaatcagaaagtgacaagaaatagaatagttgtgatgataatgatgataattattataacactctattatagacaattggttgaggtcttgtaaaacaacaacatcttgtaaatgtgattactataattgtgagaagtgacattgcagtaccaacccaagtaagaactaagaaatttcttgataattgagcatgaacaccaaaagttgttccatatttattaaattcagtttcaatatatttaaatgcaccagttgcacaaccagatgaaattacagctgaaataaatgctaaattttgaaagaatatagtaattgtagcaccaccaacacaccaacataataattgacataaaataacgagaatggtcaaacaaattgcaataattgaacaaatatagataacttgtgataaatgacttgcagtttgaacataatcatttaatcctccaggtaattgaatatctgattctgtaacattaatacctaaagtattagtgttcattaatttcatcaacaataaaggtaactggattaaatttataatcaattgaagattgggtacattcagaacttgtgaaattaatatcttcccaagtattatcatctgtcataactgtattaccttgagtacctctacaataaccatacataccaaagatataagcatcagcaaaacctaattctgcaatagttgcaccttcagcaccattaaataatgatgaaacatccatgttagcaaaatttaattcaagtaaaaaaattgatgattttgcagcttgatcaccaattgtaccaacattagcagctaaaagtaaagcaatagaagatagagcacatgctatgaccagaatagtcctaaaaaatccacaaagcatagttagttatagaaaagttgtctaagtaagatctttctctttctaatcctttaacttccacttctacttcttcaactgcaaagacagtttgatttaagttgcaaagttctgtttacgtttcaggtactggaaaaggaggctggtgaattttctaaatttttcacttttttttgatccgctcaaattatccgtttttatttctatttttatcttattttttatcttatttaatattaatactataaatggttcattacacaaataaatgaataattaattatctaattatctaattatctaatatccttctggaagtaatcctaatttttccatacgtacacgtactgcattacgatgaccatctaagccttcaacttctgctaaatccataactgcacaaccaatctctgaaagaccttgctttgtaacaacttgtgatgtaataaatttttgaaatgttgcagtattgacaccactatacattctagcatatccatatgttggtaatgtatgattagtaccacttgaataatcaccacatgattccggtgataatgcaccaacgaaaactgatcctgcattatcaacttttggtacccatgattctgcatcttcaatttgtaaaattaaatgttctggtgcatatctattagacatttcaaatgcttcttccattgtcttaatttgtatagttgtagaatgtgaaatacattgtctaacaatatcaactcttggtaatgctaatgcttgtctattaactgcttcatcaattaaatcaacttctttatcagtcatatcaactgctaataaaataacttgtgaatcaataccatgttctgcttgtgataataaatcacttgcaacaaaatctggatctgcaaatttatctgcaataactaaaacttcacttggtccagctggcatatcaattgcacataatgcatttgaatcatttgcaactaacatttttgctgctgtaacaaattgattacctggacccataattttatcacattttggaatagtttcagtaccatatgccattgccgcaactgcttgtgcaccacctgcaacaacaatacattttgcaccaactttatgtgcaacataaacaacctctggtgttaatttaccatctttaccaggtggtgatgcaaagataatttctttacatcctgcaacctaatgcaggaactgataacattaatgatgttgatggtaaaactgctgtaccacctggaatataacaaccaactttttcaattggtcttgcaaatcttgaacaataaacaccaggactagtttcaactgttaaaatatccttttgattttgtgcttcatggaaaattctaatattttcaaatgaaatatcaattgcctttttaactttatcagaaatttgcatcatatcttcactaaatggtgcctttaaaactggtgattctaattgaactttatcaaatttagcagttaattctaataatgctttatcaccattttgtttaacattttcaacaattggggtaactaatgacataatatcagcagatttttgaattggtctttctaaacatgcttcaacttcctctggtcttgcagtttctgcattgactctatttaaatgaatcttatcgcctgaaccaataactctctttggtgcttcaactttctttggtgcttcggctttcttttcaatgaattttggtttagcatcaccctttcttcttgaaacttttaaagatttcatatctaaattcttttcaatatcagaaattgaaacaccatatttaacacatcttgcaagtgcaaaatagaataagtctgctgcttcccatgcaatttcttccttagttttcgcatcagttaattcttctgcttcttccttaattttagcatttaataaatcttcatcatcaaataatctcttcgtataagagccttcaggtgcatcttgtttacgggaaactaaagtagattctaatgattttagaccattaaaattaccaaaacatgagttagtacttaaatgacagaaacctgaacctgattgttcaacaacaacttttaaacaatcattatcacaatctaaatcaattgataataatttttgagttgcgccacttgttgcacctttataccataaaccatgttttcttgattgataaacaccagtttgagttttaattgattcactaatagatttgattgatgaataaactaaacctaaacattgatttgaggaatcgacaactaaagtagtaaataaaccatcagcacgatcagttactaatgaaggaattataaattcaacaattggataaacatttgaagggatattttcatattcatttgataataattcagatttaacaattggaatataacccaatttagtaattgattttaattcatctaaacttgaaccttgtaaagcaaaaacaaaatgatgtaactgattcagatgccttttcagttgcaacggaaattgacgataatgcaatagatttatcggtttcattaactaaagtattagacttataagtaattctagcatttggaatttttgataaaatttcattaccttcttcaacagttgcaaaaactgaagcaacaccattattatataatttaagaatggattcaataatttcatcagataatgaaggataccttcaaatctactaatacattaatttttgaagttttagagatactgacaatagcatcagtatttgaaccattaaattcatagatagcttgaccaacaatatcaagagataagttggttgctgcatttacagcgtaatatgggaggactgggtaagtcatttgctgttagaaagaagataaaatagaaacaaagcaataaaaaacttagaatgtagttatttatacaaaattcatgatacatcatgagataacgaagtgtcatgactgggtactgaaaaatttaataaaaaaacggtcgagaaacataattttttaattttaattagtcattccgatctttttttactctacacccggagaatacactgcatagtcttttactatcgttaattaatgtctatatacactgtctctttagttgtcatgactaattattaaacaagaattgcatgtctgctgcagtaagttggttggctgccttctcgtcttgatctagtgtagccttcaccatattagccttcttctcttggagttcaataatacgtgattcaatactatcttcaatgactagtttcacaattctaataggtctatgttgtcctattctatggattctatctgctgcttgtcctgtatctaatgatggattccaccaactatctaaaatgaaaacttgattagcttcaacaagattaagtgcaacacccccagcctttaatgaaactaaaaatacttcaactgatggagtctcaaggaaatatttaatagatgattgcctctgtgctggtgtcattgaaccttgtaatttaactgtctcaaatccagctcttttcaacctccattcaactaaatcaagcatcgatgtaaattgggagaaaacaatagatttagttgtaactctatctgatcttgatctatacaattcttccattaatgcttcaacttttgtagatgatttccaattacctcccatatcaattctattaacaatagatcccttttgaagtgcttcagtatccatctctaatgccggtgcctccaaatcaatacttaaaccaatatggcaaactggacacttcaatttattagtatctccttgaaatccttcaacatattcactaatacaaagcctacagaatttatgatggcacttggatgcaataggttcttcagcttcatcatcacataattgacaaattataacaccaggtaatgattcaaatccactattgtccttatagttaccattacttggtcttttcattcttttcaaaactaaatcaggatgatcagctaattgcctcattctggtaatcaatgtgaaaatatttgcataattattcaaaaccacaccttcagaaacataatcatcaaattgtcttttagaatcagtatataatgattgatataaatctttttcttctgcattgaaataatctctacgaatttcaacaattttaggtggcaatcctaaatcatctgctctttcaactttagttctacggatcataatttgtcttaataataattgaattctgtggaaactctcttcaccttcaaattgcaaaccatatttttgaatatttttaagcataaaatgattgaagaaattcagatgaaccatcggagcatgaccacaatctgcacaaactctataatctgggaaattccattcctttgatcgacaaggacatttggtacagaaatattgacaaaagggagaaatatccaagaatctgatcaatgaatataattcaccaattctattttgtaatggggtacctgatagacaccatcttttttcacaatttaaaacatcacacgctttagcagttgaacttgttctatctttaatattatgagcctcatctaaaataactctataaaatttatgttcatgtaaaatacttttctctttaacttttttgaatttccttgtaaatccatatttttccttccggaaacaactttcaacaactgcatatgatgttaaaataacatcaaaatctttcaattcatcaatatttttggctctacttgcaccatgaaataatcctacttttagaatattattagtatgagtttcaatttcacttttccattgcattaatgcaactgtcggtgccactaccagatttggtccctttgatctatcatgcatcattaatgaaatcatttgaattgtcttacccatacccatttcatccgcaagaataccaccacgataattcccttcttcctcttgtctgatcatccatgataaaccttctaattgaaagttcaataatgttacacccaaatctgcgggctgttctgctctttccacttttctacctcctgtttcttctaatttcgggaaaacatctttaagatcagggtgtgattcatataatcgattagtacgtctttcaaatggtgtaagtttgggtttctcttccttctttttagttccacgttttgctggagtctttctttgacgttttgcgggttttttggtttccttatcagacttaacaaaccctccctcatctatactgtcatctacttttatctcgagtttggttgcatcatctccgacgagttcttcaacttcatcatgaattgaaatttcattgcttcctttgatcgtgatttcatcatcatcatcactcagttcaactggatcatgttgaccgcccttttcgtacgaaccaacaacttttatatcttctatataatcatcatcattatcatcatcttcctcaacatgttcactctcttcatcttcaatgttttcacttaaatatggctcttcatcgttacgcgtatctaatttgccatcggttttcttatctattgttgaattttgtgcttttttagaggcagatctagttttcctacgtctccctacaaagtcatctaagtcgataacttcattttccatgattatgatgtcaatctatatttaagattgaaactaattgaaaatgaaaagaaaatgtgtaggatataggataaaatgaaaagagcaaaaaaaatcagtaatggaacgttagatgcataatttgagagggccgtgcagaaaaagaaacgggtgagattatattttttattttaccaaattaagttcataaaactaaaattaaaaacaattacaaattataataatacaaatgaaaatatgttaaacactatcaaagtcccaaaaaatatcacaatctttttgtaatttagcctttttaggtaaaatctgttttcctgattgtaacttacgttttgcggtctctatcgaatcatctggaggtgttggataaaccttaccatgtttcatactccaaatattattagattttgatttccatccattatcactgcccattagtttatttaatgtagtcttattgcattctctctcccttacaacttcataaaagttttttgtattgcctattgatatagttgaaattgtccgtattgatttgttcttcttctttgattcattatcttccaaattagaaagtaatgtagagctagctgataagttcaaatgtgtaacagctcttattgcattaacaatacaatgtgttggtattttccccttccacaatacatcagaattatcgatacctttttctccatcttccttttgttcttcttcaacaacggataattttgcattcaatccaataggtgtagttaatacagcacttggagttaaatctttaccaacagatgcaacgcttgatttaccttttccaacactactaacttttttaacgcttgcaagtaagtcactttctttatcttccaatccaaatgtatcaaaaattgttgctaataaatatgcggaagcagtacttaatacaccatcaccatatggaatctttgtagttgctggtttaatatttgcaattgaacgtctttgtgatcttgcctgatcaatagctttcaatctgatttcttccttctcaacaacttcattattttctttcaacacagcttgaacttcagcagaattaacatttgaactaatactaattggtggggattgatttacagtaggtgtcattttttgtgcaggtaccggtgtattactgttagatgttgcattcttatttgatttggtgtattttctctttggtttcttagctgcaggtggtgctggtgttgtagaagatggcgtgtttgcttttttattagtaatagaatatggagctgaagcaactgatgggatgactggagatcctcgttgttgttgtgaactcattttcttaagcatctgtggtgaagcacttgaaatactttgttgctgtttcatcatattttgcacatcagatgggttaatgtttgttggaacttgagtaaagacaccttttggtggattatttgaaacattttgatttttagcctgtaactgagcttgagcttgaatttgtgcttgcaattgttcctgttgaattttctttgcttgtgcttgtgcttgtgcttgagcctgtgcctgcgcttgagcctgtgcttgtgcttgggcttgggcttgctgttgtgctaatgcttgggcttgtgcctgttgttgtgctaatgcttgagcttgtacttgtgcttgttgttgcgcttgagcctgtgtctgtgcctggatctgctgtggattcaaagcttgctgtttgggttgttgagtttgaacttgtgactttacaattttactactttgatccttaacaaattgtaaatacttcttaacttgatcatgaattctaatgactaagttttcatcagcaacatattgacctgaaatacttaatttttcaagaatttgttttaacatcaactcactgtaaattattcttttagttgcatcatactgttttgtcataaagtaaaaatttggaataataatagtttgacataaaaccattaattgctttgatgtttttaccaatgccagaacttttcttttaccttcatctgtcaaagtagaggtcatatctttcaagtttataggagatttgaatgtttcttgataaatacttcttaatgtttcccaatcttcaggacttgctttcaaacctggtaatattctagcagatgatggatttgtatacatcgcctggttgtttccagcattattaattgcagcattaaaagtttgattttgattggttggtaattgtgactgttgctgttgctgttggattgaatgtgttggtaactgttgtggttgaaagccattattgttagtttgacccttgaattgatttggatttagaccttgttgattaatttgatttcttacagatgatttttgagctgcttgtcttagtgaatactgttgattttgttgagcttgcttattattggaaaattgagaatttgtcataactggtgaagaaaacgtattgtgacttatattcatgttacccattgaaagtgaaggacttggtatagtggaaagatcaatggatgtaggtttggaaatatttctattgacagaattggctgtgctcataggtctggcattaggtataccagcttgtttaatatcaccctgataaacattgtgtacagggtttttagcagagtttctcttctgtgtttgttgtggtaaagaagagaccccttgttgtacatgaggctgttgaacatttgacatgttttgaaaaggttgttgctggcccatttgctgttgcatttgctggttttgttgttgctgttgttgttgaagttgttgctgttggagttgttgctgttgaatctgttgtggttgatgttgttgatttgtttgttgaggattcatgtttctgtttgaactttgcagaatgtgtaatagatattttctaacataattggcttcttcttcaggggttagcgtttgaggtaattttcccatagattgcagttttctaattacttggacggcctgtgcttttataagcattaatctgtgcttgtttgatttttgatatattgggttgtgattgttggccatcctgtaactgttgttgctgttgagccatttgaggttgctgcatttgttgattttgtaaatctgctttagctattgcttgtgcttgtgctctagctatgcatttgtgcctgtaactgcgcttgttgagcctgttgagcttgctgagcttgtaattgtgtctgcatttgtgcttgcttttcagcctgagcctgctgatgtgctaatgcttgcgcttgttgttgtgctaacgctcgagcctgtgcctgttgttgtgcctgttgttgtgcttgttgttgtgctaatgcttgagcttgtgcttgctgttgcgctaatgcctgttgttgagctagttgtcgagcctgtgcctgggctaaagcttgagcctgcgcttgttgctgagatactgactgtgattgtgcctgttgttgttctctctgtctattcatcataagaatttgttgtggatttatagccatagatgcactattttgagtttgaattggttgtgagttttgtaaattatttggagctacagatgaaccataattatttttgaaccattcaacatgggttgcatggacatttctgattgtttgtaagtcatcttgattcagttgattgtttctaaaataaggcatgatttgttgccatgtattcatctgtggaggaaaaactttaggtaatttatccaacagtgcttttggaattggtgcagtatgaagattaacctttaaatttaaattttgttgattctgagtagattggttcatactagtaatgttttgttgtggggatatattagcttgggatatcatagcttggttaacgtgtggtgaaaaatgttgtggagcttgttgatgtggtggagcgtgttgaggtggtggagcttgttgttgctgttgctgttgctgttgttgttgttgttgttgttgttgctgttgagattgtgggattggtctttttgattgagtcaatgaagcaattttagacttaagaaagtgaacatattgtgctttatcactagaatgagagaatgcatagttttcaaactcttcggccattggtttaaccgcctgtaaattgaatgactgtccctgaattttttgtaaagatgtgagaaccactttaataaactgaatacgatcattaggagagatctgcatttgttgaggcagcaggtgatccactatgttgttgtgggtagccctggttgttcatccttcctctgcttaaagaaaatgcaaatgagagattaaatgaaacagaaggtaaaaagtggatttctctaaattagataaaattaaatcgcatgagggtattttttacttttttgtgcaattaatggcaatgtactgtaaattaagatatgatagggtaggttactctctatacatgtgtgatataaattgtaataaatagtataataaaatatgttttattatgatataagagttcattaagctgatgcaccagggacattttctttacccttaagagctagaagaagatctctaaatctggtcttatctctgagattagtttcatcaattgcattggaattcttattaaggtctaaaagttgaataacacgatcccatgtagttccgtctttaaaaaaattcttcttcttttcaataaaagcttctgcttctttacgagtctcagcaattgcatcttccttcttattgttataattgtcatagaaatcatcaattgcactttctgcttcctttttaagatcttcaagcttacgtgcagcagcttcatctcttttactaatctctaaatctctggttttcttccattcctgtacatgagcactatcttctaaattaaggtttgagaattgtaatggaagagatggttcattatttgattcttcaatagtctctgtaggtgtttgttcttcttcttcatcatattcagtattttcaacttgattatcacctgattctcctacttcagggaattgggatttgaaatcctcaaattcatcatcctcatcaacgccttcttgagcaataaaatcttgatcggtggtaaattcgtcaccgagggcagacttttctcttgcaagaaaatcttgagcatcattgtcaactggtgtttcgacgtcgtcaatctcaggaaacttttcagacattgttatttacttctgtgtgtagtagttgtctttaaaagaaaaaggaatgaagtgttcaaaagagaagataattgccataataatagtagaatttgataaacaccataataaaagtcgcacttaaagccacccacccatcttttattattcaacatgaatctgagagctcttagatatttaatcctaagtattgacaatcattttctttttacatgattgatttttaacagggaaaatgtctttttcaacagagaaggcagtacaaaagttaaagacattggatggtacacaacaatctattcagagtacatcccaatggtgtcttttccattatcgtcattgtcatgatatagtaacattatggatgactgcatttaccactccaaatgaatttaataaagataatcaatcagattgtatgtatagattatcattattttatttatgtaatgatattttacaatttagtaaaaagcaagaatctaaatatagtgtctatttaaatgaattctcacaaattatgaaacaagttatggaaatagtggcaaatgatagtgcaagtgcacatttaaagggtaaatatgatagagttttacaagtttggatggatagagctgtttataaacctgggtttattaaaagtatacaaacagatcgtttacaggtaaattcaaataatggacaatcgcatccagtacctgggagaagttgtaccttctatgcatacatcatctcatgttgcccctcatgttgcacctcacgttcctcatattgtccctaatgtcaattcaattccagaaaaatttattcctattatcgaaaaatataaagagttggaagatatagataaaaaatatcataaagatttatcatcatataagaaaactgttgatgagtttcttaaaaatggggatgatggtaataaagctgttgaattgagtaatattttatcatcactttcatcacttggaggaggtaccgaaactacgaataattcgaatgatgatatgaatgatgaagaaagagaattagagagattacaacaaattcaacaagatggtaaaatacttcaacagcgaaatgatgatataaatcaaatgagagatatgtttagttctcagttatatcaattagcagattcttttagaagctcaaatggtgttgatgaattagcagatttacaatcaatgttaagtgcacgtgaatggacattacaagaaagtaaaaatttaattactgtgtataattatgaagatggtggtgaaactggacctgtttatgcagaagatagtgatagtgataaagacaatgttaatgatgatagtgatattgatagtgatgatgagaaagaaaatgaaaatgctgatgatagtgagtctgaaccagaccataaaagagcaaaaatatagatttagagcatttgtatgttttatattatatagttatcaaaaaaatagtacacttagaacaatatgtatgtcttttttttgtaaaagaaaataatttttaaattcatatgatcttaaaaattttgaaactttaaaaacctttctccatatccttggaaatcattgatttttcatttttaggaggctcaacttttttctaaaaaatgcttttttatgaaataaacttctttatacagggctctaatacagacttttgttctttgtagacttctccaatcaatatttctacataatgttactataaattcctttaaaagactacattaactaggttaatacttacactataaaccatcatgacaatttaattgttgtatacaatagaaaattacgcggctgtatattattactgtcttaagtttaataatgctaatcgtgtaaatactataagagttaccacattaaataactttaatttaatgatgataataaataaagacaaaataacactatctgtatttataaatagtattggggtgtaatatccaggtatataaaccccaatccctaatctttatatactgtcggagaaacaacatcccctaaaaacaccgctgacataatccatcatctacgcagcattaaaaaaaaccagtggaaaaaccttgtcatgtcaaaagtttcaaaatgtaattgttatgcatgaccccaaaatacactttctttcccgattatatacctcttcttccttgaaataatgtccctttcattaatacaggtaccgtctgaacttgttgaggggaaaaaacttctccaatcaaatgaagggcccgatcctgtaattattttagcttcagttttagctaaatcaaataatccattggttcataatccaagattagcaaatatttcatggagattgtctcaaagaggtaagtctgtttcaggtaaagatattcatacaattaaggacatatcttctggtaaaatctgttctgaattactccgatctaaggagaatcgtgaaaagaatgcaaaattaactcaattagatttacaaagaaaaattgttcaggaacaggataaagttaaaaatactccaccaactaaaaagcaagataaattaattaatagtcgaaaatcaccacaaaattatcatcatcatcatcaacaacaacaacaacaacagttgaggaagcccagattctatattgatcaatcatcaccagattctcctgctttatctgcaacaccaccaatgtcttcaattgatacttcattatcattatcattatcagatcaaatgaaaaatggcaaaaaaaatatcaaaaataatattaatggtcatgttaataatcattttcatcatgctcaacatacaacacattcattagttccgacattattcagtcggcccttacttcgagatagagatggtaaatcacaaagtcaaacacatactcacgaaaatactcaaatattaaaacagaaacgaagtcaaccaatgcaacaaacaacttctcaaacatcattgctgtcaactgtatcgcaaacttctcaaacttctcaaacatcattatttcaaactaatactcatgtagttgtttattcatcatcttcatcagatggcgatagtagaaatagagtaaagaatggcgaagaagacgaagaagaagacgacgattttgatgacgatgatgatgatgactggtcatcactttcatccgatgaagaagaagaggaagatgatatgattaagtttaataaaaaggatagtgaaatcacaaaaccagtactcaaaagaagtttacttagtggattgtttcttgatgaaatgggtaaggataagaattcaaagggtaataatgataatgaaaataaaagttcaactccttatgattctcatcatcgttctaatgcaccaatgactgcagcaactttattaccaacagcactttcaacgcacatgtttttaccaactaaaaatattaaaacatttcaagatgttcaaagacatcaatataatgttcataaaacaaatagggttgaactaacacatacaaaattggcattaacaagggataatattgctaaatttacatcaaatcatgatagtagtaataaaaataatgataatgcatccgaatatgcatcaagtattaaaacttcaacatcatcaattgatatacccggtataaatgatagaaaattaattgaattacagaaaaaggaaaaacaaaagcaatgggaattagaattagaactacaaaagaagaaaagaaagcaacctgaagatatcaataatgatgatggaatttatacgaatattacacagaacaaaataaagagttataaagtacatgatgaattagaagatgaaaatagtttagattatcattcacggggatggtaattgttttaaatgtaggtaataaattatattagagcttgtaaaatttttgtactatatttttattgtatttacatgtaaacttatatatcagtgtttatataatatataacgttattcaatttaattaaagtttaagatcagcaaatgagataatcctactgtcagtaactggtggtttaacatcattttcaagagctttttcaaattctaaattaagtgcagttttctttacagctttttcaattcttgaaccaccaactgtaattttattaacatattcagaattttgtaaataaccattacgttttggatcagaataaaatacaatatctcttctagcaactggtctagcacgtaaaggaattttacccttattttctaaaaaccaagttggtgaatgatgtgctctaaaacctaatccacgactataatatgctgaagtatatgaaccaccagcattttcaattgcttcgatagcaggttgtgatgcctttgttgattctattttaagatttaatgtatatttaaccaatggatcattaagaatagcaacaccatccttcatagatccactgataagtccagctattttcatattcttcatatctaatacttcaccttcctttaaaaatgataatctaccttgttcataaaaattttgaatttttgataatttaagttcatgaagatctaatttttgaaatctataaaaacctctttttgggaataatttccataatggagtttgaccaccttcaaaccaattaggaactgaacctcttgccttttgacccttttgaccacgtcctgatgttttaccaagtcctgaacccggtccacgacctaatcttctttctctatttttagaatctttggttggtgttaatcttgcaagcatagaagcttgtcttacaaatggtgtctgcagagcaggcacatatgaacggatgagtgcaaacattagttattgaaacagatatctatgaaaagtcttttcatgtaaactacctctagtacttcaaatttgaagcagttcgtccaactacagaaaattcaaaaaaaaaaaaaatctcggaaaatttaaacacttctcgcaaatttagtacattttcttatatagtgacattacatgaatcattacatcagctttacaactccgataaccacagctaaaacagctagtgtaggtccatacaccgagacaacttcccaatttgaatgtaatctgagtgggaactcaattgtatgtgtctccggtacatcgaatttacctgtttcataataatttgccatatctttctctttcgtactccatgttttaacaatccacttctcaagtgatttcatttgttcatcttcattaagttcattattgaaaatatcaggcactaccgcattcaactcatgttcatcaactaaaattgaaattttcttcggtgatataccttcaatatagattttccataatgtatgtacatcctgtgccattatatcctttgtattacctgtataaccaattgtaaaatctaaaatcttacttgagttttcattcaataaatttttagaagcaacatataatcctttgatacgaggtaataaaacacaattattaacaggtaagttagattctaatgcaaatttatgtgatttatttctattattatgactcatattagtaccttcagggaatatcaacatccaaaacttttcattaacttttaatattttacgaaattgtgattccatataaagtctatcattttgccaatttctagataaaaagataaaattatagtttttcataccataacctaaaattggtatattttctaaagatttcttcataacgataaagaaatgactggcagtattattcaaataagctaagaaccacaagaaaaaccaatcagagtatatttgatgatttgatataataattgcagaattatcaaattttaaaagtggtaattcaccatcattgttctttgataaacaatttttcatcagttcttcatcacggaatgacagtgaaatagttgaatgagatgtgaaattacttgtacagaatgtaagtaatacaacgaatgattttttagtgtattcaagttgtgattgcaatgtagatgatttagtgagggcgtgccatattatgaacataaattgattgaaaacaattgcaattgcaccggagaaaaagaatatcccaagaagtattagtcttatcaaatgtaaagggtttaatagtggatgcatttggttatattattgttgtgaaaacaagatcaaaagaagagaattaaagagaataaaaaagataaaagaaataacaagaggcataattacatattgtatccgccgctctcgttcccacatgtgcattgttgggcagtggggtgttaatctgttattttatttttgttgaatctttatggtcatatgatcttatgacagtattcatggaattgtattagtagttatattacacagtattatcataatcatgtattttatatacagaaagaaaaagacgaattttattcacttcttttgaaagatccaatttctacgagttgttcggtgtaaactttgacatcatttaaatatttctccaattcatctgattctgcccaaacttcaacgaagaatgcatatttccaattgcccaatggtcttgtagttattgtatgtaaattaagattatgaatattaaaacaatttaaaacttcacataatgaaccatgtttatcatgtttaatcaatgtaaatgcaagtaaatgtaataatggacctttaagttctttctttttacctaaacataggaatcttgtagtattagtaactgtaatcttcaatattatgattcaatatgggtacattatgtacagtacttgcagttgatgaagcaattgcagctgaatgtttcctttccgattcatcaagtttagctactaattcaactgcatgtgaagttgatgatgtatcagtacattgaactttcattacattatctaattgatgagcactaagaaatttacgacattgagtccaaacctgtggatgtgaataaatatgtgtaatatcttcaattttatttgcaaatgtaattaaattatgatgaattgagacaaattgttcatcaacaacattgaatgatggtaatttatcattattcaagtaccattctttaaataaatcataagtgaaaacaacttgtccatttgtcgaattttcaaatggaactaatgcataatcaactaatccatcatttatagctttgaaacatgcaccaatacttgattgaggtacatgtaaagcatttggatcttgttgtattgcagcttgatgagaatatgacccaggtggtccaagataagcaattttcatcttatcccttgaaggaatataatcatattatcatccatggatggtgactcttgaaaaaagtgctatgaattatctcattaatataatcttacagtttacatacatgctactttacaccattttagtttagacaattaatatgcatctaacaaagaaatctaatatacgaatgcatgtccctctttatcaatattagcaaaaccttattaatatactattaactatatatatagggattacttagatcttgcttattaatcgatgatgaattgagtattgaaactttaatcctagttacgtaagagtattaattatgaaacaagtaatatcaaagtaagttattatgttcaaattgtattttattagtagtttattacagttttgatagttacggacacaatttcgaattaatgggaaaggaaatgcgctttgtatgttttatttcactttattattgtattaaaatgcatattcttgtattctggggaatctatgattattatactttaattattatatacatgacatgacattacgaagataccagctagttatcaaaactttgagataaacgaacacattcatccattgaaaatgttacatcacctgtattaaattttttcaaaagttctaatctttcactttcactctttgatccagtatttaaaccaccataaaatctttgaatatttaagattaacatttgagcttcatccattccaacaccaccattttcatcaacatgaccttgcattaatacaatatctttagtttctgataattcactatggaaagctaaagttgtatgaggacgtgcaaattctgcatgtaatttatattctgctaaagtagttataatacaatgagttgtatttggtccaacaaatgtccattgaacaaaatgcatttccattggggttttaccatcaatttcttcacctcttggtaatggtaaaacaaatgttggatatttacgtgcattttcataaatttttttaaatgttgttgatggacttaaagcagctaatgattgttcatctttttgaaatttagctctccataaaaattcaatttctggtttattcaaatcttttattttatccataacaaaatatgaatcaagtgttttatatgggatttcatcaggtattgaaccatcaattttacgtttagaaatatcaatatctttcttttttttgagtgattcctttaattttaatgcttgttcataatcttcaagttcctttaatggatcaatcatattcaattgctttttagtttcttcgatagttggtttcatttcctctaataattcttcaggactatttaaacctttttgagctgctcttgcaagtaattgtgcacgatatttttctttaatttctgcatcaataagtttctttgattgaataagtctaacatttgaaacagatgcccatcttacagatttgacaagcggaatacgacatttattgaaggttgtcttaaacatctcgacttctatgctataattctaataatcgatatcaatagaagatccaaatatcatatacacaactcgaataaaccttgaacaacttaaactttgacaatttgaaagattcccgcgatttccatagtaactactacaacttttatagtgtttgctgggggtaaatacattctattttactatagtgtatacgtgagtgcttatttgttagttataatacattatatcgtatataccgtagaggtagtacttactattacacagtaaatatatcccatctttgaagagataaataaaaacaaatcacaaagatatttttaaatatttcacaaaaagtcataacactacccatataggaaaaaggtaaacacagggtttccactttgttcattactttgattcacttaattaatttgatttccagttcttaaaccattataacatacctcttctgtagttcttagtataggaaaaaaaatggaaactacatcactggatgatctggttgaatataaggctgttgtgattgagatccctaattcaaaggaaaatccctttcttcaaacttcaccctttctgaaggatactttatacatcattatattcccagtaatttttggacttattttattttacatcattggagttgtaataactaaactgcacgctaagagacaagtacagaaaactgaaccttttgataaagtttatgaatttgttgaaaataatgataataatgatagcaaaaatccatttagtgataaatttatggccagtgaagtttcatttgttaatacaaatcctatgatggatagttataaaaataaaagtgttcactcacttgatacgatttcccaattttcaatgaataatcatagacaaagagattcaattggttcaacattacaacttaattttactaatcaaccaaatcttcaacctgatggaaaggaaagtaaaatgggtgatggatttggatcaccaatattttatagtatggtaaatacccctgcaattacagattcttcaaattatgcagatgctcaaacttcaagaagtagaacagatactaattcaactgcattttattcactcgatgagccatcaaaagcaatgacatcagttactattaatagtgttaataataaaacaagatcacataaaagaactataagttcacatattcttgatgaatttattcaaacaggtgaattaccaatgctaaatgaatcaaatgataaaataaatgaaatcaatgtaaatgataataataataattgtaaaattgaaaatcattcaatgtatgaaaattcaaataacttagcatacgatataccaaaaaataattcaataactattagatcaacacattcttcaagatctccaagtccaagaagagattatagaatgtataatcaatattcatcaagaagtccatcacatagtccagttagaaatcctaataaaagttcaattagagatactaatagtccaactagaggttcaacaaggggagatattggactttaatcacttgttttatacaagattaaaatttcatttttttatagttttatagcatcattctttatataataatcggaaattattattgataaatacaaaccatacatacaaaagagattagattaacaagattattattttattttagttcattttaactttattttatttactttactttattttattttatttaataattacattatagtacaacttgatttatttccatcatttgaggaaacattattattagaagcagaagtagcggcagcaggtgacgcagttaaagaaattctagcagcttcagtgaaaacttccttaacgcccctatttttcattgcagaacattctaaatatcttaaagcaccgatttgctttgccattgcaacaccttcctcataagatactaatttttttaattgtccatcattattataagctgaggtacccattgaatcatcaatttgattatcagattgtcttaaatctgcctttaatgcaactaaaattaatttaacaccttcacaatgttctaaaatttctcctacccatttatttttaacattttctaatgaatcatgagaatctattgaaaaacaaagtataatacaatgagtatcagaatatgataatgaacgtaatttatcaaactcttcttgacctgcagtatcccataatgaaagttgaatttgtttaccatcaatgaaaatatcatgaatatagttttcaaaaactgttggttcataaacttttgggaaatatcctcgagtgaaaacgttaagaagtgatgttttaccacaagcaccgtcacctaaaatgacaatttttctttgaactgtaagtaaataaataaatgaggaatttgttagtatttgaatttgtttcaatgaaaaaaataatagtacatactagctttagggggagctccacagagaggcattgttgtggatgcaaattgtaaacaacagaaccaaaagataaagaaacactgttgtttcaaattacttgataatggcactgttgagatcaaaaacactttgggaaatttcatgttgtcgcttatgattatgtaagacttcttaatttttgttttgggtggttctctgttgatgaaaatttgtattgttttaatgttagggattgttctttgatacgtaactgaacaatggctggtggtagagatagacacaggcataaggctggtaaaagagtaagtggaagagatggtcgtggtggattgaaaggaaacccattatttgaagctttaaacggtgttcatgattcaaaaaattcaagtccacgtaccaacagaaatgaaaaagttaatgaattaacaatacgattaggtcttgctaaaagagagagtcctgttccgactagggatactagaaaaaaaataccacttagaaacgataagaaaaaattaattcctactagtactaggggaagttcatctattgaatcaaagaataatccattagcagtagcgttaggactgggacgactgccttcaggtccagcaccaaaggcagctaagagaaatgataggagaaatgatataaaatctaactcaacttctaatttaagttctaacactaatcgtaataatgataatcgtaacagaaaccaaggtagaaatacaacaacacgaaatacacaacaaaattcaacaaatatacaaccacaacaacgtgtaccacaacaagcaccaatacatacatctaataatgcaccatcaagatcacaggcaaataatttaacttttaaaaatgcatcattaattccatttttacgtatagagaatctggattcaacagttaatgaaactgatattagaatggttttatcagcaaaattaggtccaacacttaaaattattaaaatgaataccatctatgcaggtaatccagctgttactgctgaagtatttttccttaatgagaataaactgcaagaatatgcacaaattttaaatgatatagttgctgatggtaatagtattaaggcaacaattgcatatcattcaaatataattaattctgataaactgtgggaaagtgtattaaaggaggtaaggatgattaaacaagaagttattagacaaaatcctgcacttaaatagtgtttttttattgctaatatttacataatattaatgtattgaattaaattttaggattaatttataaaaaacatgttatataaatttattttgtactttaaaaatgttaaattattaattttagaaacttatgatactaaccattaatcaatgaatcccaattcaagaaatgtaatgatcttgcataatagaaaccatcttcttgattatcttgatattcactttcataagattctgcattattatcacctttatggaaaccagttcttggaccattaaaagtaatttgtggcattattacaatatcatcaacttgagttggaccttttgctaatgtaaataatttataactaaaaatttgagttgtttcaggaccgaaaatttcttcaggtattaaatctttatcagttctagcaactctatgaacaattggattatttaagttcattaaaataatcaaataatgtatcagtaaatattgattcaccagtaaattgaattaaaggttcatcatttgaatcaacattttgaaatgctttatcccaatcaatattttgaatttcttcttgataatttaaacttgtataagtaattctagcaattaattttgctaagaatggatgatgagattttgctttaaaaatttttgttgaaaatgttaatcttctattataaagtatatcccaattaatatcattataatcaacattaataccaaccataattttatttggttttaaagttgattgataccaaaatcttaaaggttttgcatctaatgtatcaatatctgcataaataccaccacttgtaaatataactaaatattttaagaaatcaaatttaagtctaatatcaggtaacttcatataagcttcaataacttcaggcatatcataatggaaatgattataaatttgttgttcagcttcatcaaatgtaattaaattatgattatattcagaatttccaactctccatctttccatatgttggaaacatttttttgggaatttttcattatcagctctatatttccataattgccaaatattattttcaacaacttgatcttcatcaaatgggaagaaatatttcaatctattctctattgttttaaaatttttagtatttaatcttggcggtgattctttatataatctactaaagaatgaatcagttgaattattttctgattttaatgatgaagtataataaagtgggatggttggttaatgcttctaattgaaattgtaatgttggtttattaatgaaaatactacaaaatgtgaacactattaaagttgttataattgctaatctaaatgtctttatttgtaaaaaaaccttcctcaaggtattcttcattacacctaaagctgacccactactaccaatagatggttcagcatgtgtacccagccttctatacattgtgagtagtttatgaagtgaattagattaaaatcaaaaactgaaaaacagttaatgctatataattgttctgtaatgtttatttaatttccaaatcaacatgttgtcgtctctctgatgccggtaattttacatagcaatagtgagattttaattttccgcagttttcgcgtatttttcttattatttttataaatagtactatgtattacatgtattacataatcaatgattaaaatgagtggcctcttgataagagttgtacatttcacggagttcactgatggacatctcttcaaatggtttagtaattggttttaattgatagccttgggatggtaatcgtgtaatggtattctttctagtattactcaatcgagatggactgattccattgggagtattgataaatgcttgttcaagtgttgttaatagatgaagttcctgatccaaaatttgtagttgatccattatcatgtgacggtgatccaaagaatgatgtgttcataaaacttgctgcacgactacgaatattaccactggaagatttcattggtgtcgttccagtattcgttaaattatctgtagtattggtactagtattcgtattcgtattcgtattcgttgtaggttctggtggttgttggaaacttttcattactccacttgtgaacttacttataataccctctttattattttcaaaacttgagaatgcttcattttccattaattgttgcattgcagtatcatcaagtttaggttccgcaagattctcctttattgtatcaatatttgtatcactcatccatggaactctacctaaaatatttttcaaacttgaatcaactgttttacttatacttttaataccttcatctgcattaactaatggatttgggataaaattattagttatattacttgtaagattatttagtgaattattgaatgtaaatcccataagacctctattaattgaaactatttcattatttagtattaatggattagtttttttaaattcaacaattttatcttcaatactctccaactttaatggaactgttaataacccaattaattcctctcttgttctcatacttcctggtaaaagattaatatcatctgatggtatatccagtccaagattctccaatgtaacacttgataaatatgagattgctgcctcaaaatttgcacatacgtataatattttacccttttcaatttgtaatgcctctattgaattatcgaaaatatattcattagagaatcttttcataaaacttaattgccgtatgaggaaatagtttcttaattccttcaactttattatggaataaattaatataggtaaataaatatcagtattaagaataatcttttcattaacattattactatcatatttttcaataattttattaaaaataattgcaattgattcgtgtattttaattaaatacttcattttcaacgttggtgatctctcagctgttaatagttcaaattctggcaataatgtttcctctatttcattcaaaaaatctttttcaatgttttcggggaaatcaatatctagattatggaaatttatatgtaaagaccctaaacaacctaatttatcactgaattcctcactaaaatctttctcaaattcatcgatttcaatattcttcaatggaaaaacaacttgactataaaacttatcacaaattattctttcaataatcaaattgtatctaaaattttcatattcagaatcatcattatttttattattattattactttgggttatattctttaattcatatttaccaattttattattatattctttacatgataattgaaaatcttgataaaatctttgaaataattcagcaatttcaaaactagctaatgatctttcaaatttaggttcctttaattgttttaaaaaattctcataaaccttaagaagttcaataggtaaatcaccttcagatgggatttctgtagcttcaaaaaaagatattgagtcattattatttttaatcgttgtattcattgtccctgttgtaactgttgttgtatcattattatttgtattattaatactatcattatttaaaaatggattattgtttctatttgattcaatatggaaatcaagttcactaaaatcttctcgtacttcaattgctgattttttaatatcaccaatttcattaggatcagtagaatcagtttttatacttggtgattctttagtttcattagtatctaaagttgcagattgactattgttatcatcatcttcatcattttcaatatctgataatgaactattatttgcaacatcataagaatgtttgatcgatacttcagttgtccaatctgccttaacaggtggagtatgaaacattacgaacgtgctaatctatacaatatttaaaggaataaaaaagatctgagttttaaaatgatgtaaaatcgatatatatttccatcccttgaagaaaaaatatcaccgttttttaccccttgtagtagttgtatcaagttacatcaattaatggatacatctttttacattcgaatcgattaatattatatatatattacaagagtatacatgtagacatatagaactaaaattacctatttataattaattaataattttttccttctttaaatattcaataatggtatcaacacattcttcaactgattgttcatgagtattaatatgaatttctggcttttcaggtgcttcataaggatcatcaataccagtaaaatttttaataagaccttgtcttgcctttttataaagaccttttggatctctttcttctgcaactgataatggtacatcaacataaacttcaataaatggtaaatttgattcattatgtaattttcttgcttcatctctatctttcttataaggtgaaataaatgaagttaaagcaataacacaagaatctgcaaataattttagcaacttctgaaattcttctaatattttcatttctatcatgttcagtaaatcctaaatctttatttaaaccaaatctaacattatcaccatcaagtctataactttgaatattagtttctaataattttctctctaatgcacaagcaatcgtacttttacctgatgcacttaaacctgtaaaccaaagagttgcaccattttgtttaacaagttttgaacgctcttcatgagttaaattatgatgccatgtgatattagttgccatttttattgtctatatagttttctttgcttcaaaaaaaagagttaggaaagaaaaaacatttactaatgtttaccaaaataaattctacaatatatcaattaactaatcactgaatgagttgaagttatccattcaaagtccttctattgttaaaagtgatccgttataaaataataattcaatttgatgattattatagcaattttatgttaggttacattgggtaagatgcttaaataaatgcttaattaggaaggcgccacagttgtgtcacgtgtctttgtactttgtcacgtgatgtgtactttttaaaatcttttaattattatttatcaattgagaggatatatagtagtaggatctagaaggacaacaggtataggttgatttttttttgtaaagaatttccactatgatacagcattactactagtagggacattgatcattatattctgtgatgtgcaagatatcaaagctagattcataatttccatcgcatcaatttttcattttcttaactatgggaatatcgttagtttcctaattaggcaacttaaaaaaaattaaatttttcaaattttttttcaatttgattacaattaatggttatcaagttgaattaattgtccatcaatagacatcaaaatggttaaaaaaagtagtaaaaatacaggtaaagaatttgtatttacaaggaaaccaattttcaatattcatcatcaagcagatccattatttgcagcaaaatgtcatccaagcgaaccaattttcattacaggtacagcaactggtcatgttcaaacttatagatatgattatgaaaaattaattgaaatttatgaagatcaagataaatttccttatgatataagttgtgttaagtacgatgattttgatgataattcaattatttcccaatggcatacaaagagacataaaaaatcttgtcgtgatatttgctttgatttaccatcaggtggtgaaaaggttcattcaattggttctgatggtatgattaaaactgctgatattcaaacaggcttagttacaaataaatttaattccaaaactgattgtaaatttgataataataattatgaactaagtattttcacaaaatgtttaagtgtaccaaataaaaattttttattagttggtgatgaaagtggtaatttaacatgtcatgatacaagattgaaaaatttaggtttatgttataaaccatccaaaaaattacatatggcagaaggtattaattcaattaattattgttggccaaagagtgattataaaattataacaactggtagtacaactgtttgtgaaattgatttaagaaaacctagtgaaccattacatacaagtgaagatcaagaagatgaagttttatgtgcaacatggcttgatcaagagaaacaagaaacaatgatttgtggtatgggagatgttgtaacaacttggaaacctcaaatgaatgaatgggaagatcaaattagtagaattagagttgcaaagggtgaaactgttgaaagtttagtaagtgcaatggatccagattcaagatatgtttatggtggttgttcaaatggtcatattgctaaaattgatataattggtggtaaagttgtggaaagatttttacaacatgatcctgaagaggatgataaagttgatgaagttttaggattagatttagatcatcaatatagattagttagttttggtactgatggatttaaaatttgggaagatgaatcaatggttcaaaatagaaatgaagaaaaggatgacgatgatttcgatgagagaagtgattctgatgatgatggtatgaatactgatgattataaaaatggttcagattcaggagatgattcagactctgatgttgaattgaaaactgattctaagaaaaatggaagtaagaagaaagcagaagatgaagatagtgaagatgaagatgaacaagatgaggatgaggatgaaaacagagaagaagatattgaagaagaagacgatgatagagcaatgaaagctacaaagagatcattatctgaatcattaaaacgtcgtatggaagcaagtaaagcagctgtatctaaaaaacaaaaagttgaaacaacacaacaagaatccgatgtagatacagcagatagtgatattggtgaagaagttccagatagtgatgatgaaacagattttagtcaaaataagggtaaaactgttgaattacatactataagagataagattattgcagagatagagaacccagtagatacaattgataataaaggtaaaaagggtaaaaagaaagataagaaacctaagaaacaagatccaggacatggtattcgtcgttttgaaggtctatagagtaatttaaagggtatataaagtatgtaaataacacgtatatagtcataatggctttctcttccatgctaatgagctattctcgtttcatcaaatgcaagaggagcaacttttgtatcttcaatactcaaattaaccaatgagtccttgcctgatatcttactaatggcatatataaattacatcaactgtacttatgttgttctaatttaagatcaacttggtcatgaaaagcaacctgagcatcatactcaaatcgtggaatgtacacagtagtcacggagatgcattggcctacaaattttccttgaagatatctttaaaataattagggactaaaactacagaacagtcatagtctaagaaataaaggcttgagatggtttgtcctgtatatctacggaattcataaagacttcgtgtagcgtacaattgtagacaaacagtcatgtatgagcggaaagaatcataagatacccttctgacgaatatgttgtcatgagaacttatatgccagtgaaatcgatcacagatcgataaaagtttggttagatcagcatcataaagaacaaactcatgagaccagcagtctatttcaaagttttctgtgtcgtcttctgcttctgtatcgtcttctgcttctgtgtcatcttttgtttctgtatcagtcttttgttaaacatcttattctatcgtttaattcagtgatcagttgtaatttatcttcgctattccgaaagaagtacacgatttatttcatttgataactcatggacggaagaaattaatttacctgtttcgtaagtatccatcatgttgtaataaatctatataatatgcattcaataatagagaaaattagattaaaatattatatacacatgcatcaacgaaatgcaagtccgttacttgaatcctacttagtactacatattttagacgctaaaaaccgcgatttttttttatttcctgaacaacatctttgggactttccgcactaacaaatgtagccctttttcttatctgacctctagttatcgagttatagccctttgaagttgattttttcgatttttcaaacgttcatatctttttctttatgggtcattgaaacacgctcattgtgtcattagatttggaattctttgaagtttgtttagtaatttacttgggatcattggagctttcctccgtccttgaaaggaatttttagttttttgactttttgtccatttttgaccactttcaactgactctggctccttcaaatacccctggaggtatacttttgaaaaattctgtgtgtaggccgtattactctcttcccaatgacaccatttttagtttttcaagtaagggtaaagtacattaaatatccatttttcagtgaattttggacgttttttttggggttttttcaagctatcttttttgttactttttgttaacaagtttaaattctcaggaattcagtttgtagatttgtttctaaattattatctgttgtgaattatggcggaaaatgtttttgtagaaaaatgttatcattcaatgtgttcaaattttgctctttttttttggcaaaaaatattaaaatagtgataacttttttttgaaagcctaactaaaaaacaatatttgatattttgtagagaaaattttgctcttttatatggtactgttaacgcctgatttagaagagattggaaaatgtagtgccttaaattaacgctgattttaacgcttttcaaatagttatagtgatagttgattacgtaaacgcgtatttaaaattcatgtagctgaatttttcatgttacagatttatttcagtgtctacagatttaatgaattctttacggtttacatactcaaaggtttaccattgtagtgacatttgttattattagcttgctattaaaaataaaatgtgtagtagtaagtaggggtcaaaatttcccgtagggaaattgaaattaccaaacccaacgctttaagcgtcagtttccccgttaggggaaatgacaaaagagtcgattaggttcgtcacgcggaaactagtatatatatattaaattatacagactagaaaatatagagcgacatagtaaaaatttctcaatatgagagaagggtcttaagcctttgtaataattaaatttatggtgattaatgaggtttacgttaggaaggaatatcaatttatttatttagagtgtaatgtttctattttttttaactgtattctgtttggttctctttctatttcaaccatccacaaatgactgaagaaactacccttggtacatattttgccaaatacaatggatcatgtccatgagtctgaaaatgtcgctgatttgaaaaaggttgctgaagattcactaagggatgaaacaattgaaaatgattcacaatttgatgatggttttaaagatggtaataattctaaaaattataaacaaataacgccatttgaaactgaagctttaagattaaaacaaaaatgtaaagatttaaagcaaaagataattgatattgaagctcaaaatcaaattagggcaataggtgtttcgagagcaaaagattcaatttcaagattaagattcgaatattctttgcttttagaatttattgaacaaaaaagtactactcttggtttccctgatttgaaaaaagttaaaccaactgatattaatgcagattctgttcaatctttaacattggatgatttatcaactcttttagctaaaactccacttgaattatcaaatattaaaaaattattacctaatgaattaggtgatttaatatctcaaagacaacaacaatatatagattcaatctcatcaaatgaacctactacttcaactggaagaaatcgtaggaaaagagttgtttcaactatagcaaataatccacccgcaaagaagaaagttagagatccaagagaacctaaaagaccaacaaatgcatatcttttcttttgtgaatcgcagagagaatcaatcaaagctgaatgggctcaaaatcatccaaatgaacatttagatttatcaaaggcaatgactgaagtttggagaaatatgaaagaagctgaaaaaagaccttattttattatgtacgaaaaggataaagaaagatatcaaaaagcttatgaagtttttgcagatttaaaggaaaaggaacgtttagctacaatggaagaattaaaatcttctgttggtggtaatgatgatatagcatcatcagttgaacctgaaaatatacttagtgctgcatctgacggcgaaacttcacaaattgattctataattgatgcagctaaggattcactggttaatgtagatgaagaaaatgacgatgatcttgaagatgatattggtgatgatattacgaaagaaaatggtatttatgatcgtgaaaatagtgtactttcgtttgatcaaactgataatgatataccagatagtgaaggtccaaatacggaacctaattctgaaattgtttacgatgatgatgttaacgatgttttagatgatgtggacaatgaggatgataatgatgttgaaaatgatgaaaatccaaacactgatgtcaccgatcaaccacaggataataatattgaagataatgttgaagatgaaggatcacaagtactgaaatcagaaccagatattttagcggatgatgcaaactaatctgcaatccataaaataccaaatttactctattttatagcttttaattagctgttcgttctatcaaaaatatcataattttaattattaattattatttacagtttgcttatataaaaactattttaatttacataatgaagaaattttacatctttcttctctttggtttataataaccgttttcatccttattgtctcttctcttctctctaaatttagcatgtttcactaatttcttcctagctgcaacacccggtttattcaatgctaattgtgctctcttagtttttctttcaaatcttctttcttgaataattttcatagcattcgataaaagaatattgtaatccgaaataccaatctttttggataatttgctcaaacattcagtagctaatgttggtaatgtattctcctcattttcattttcttcaatttcagtttcagatatatgtaataatggaatcattaatgtctcagataacacttccttcattttttcaacactcaagaatgtggttaaaaattcacaatatgaaataatagccttcttagtaacaagtaattgtttataatctcttgaatcatttttcaatatagctgcacatctatttaatgcccaatcaaaggagttattaaaagtttgtcttttagtttcatctgctttaacttcttccttactgaatgaaataaacttggtttgattagaatcccaatatttggaaatttcaaccaagttttcaacactctgctttgcaagattttcagaaatatttggtgcacccaattgtctaaatgttctatatgcaattgtttgaatagtgaaatcatcaacttcaaattcaacattttgttcttttaacaatttggaaactaatctcgaagctgatagtctgatccatgaatgaggatataacaaagttgcaataatatagctccaagtttcctcatatttagatgtaaatacacctgtcttagccgaaatggtttcaaaagcacttaaacaggaataaatcatttgccattcagaagctggcgtatcattttcatcttcgtcttctacatcattttcatctactctttgaccggattttaatgttctattaataatttccaaaaccaaatcatctaatccgctattgattccaaaaccaattgagctaacaaaaattttgtaaacatttaaaccacatctgactaataaaggttttttgttttgacttaaccatgcagtagtatatttgtaaacaaattccatatcactatcattctcattcaatctgacaaataatgcctccaaaattaaagtagcactttctctacaacttggattatcatcagtgacagaaacatttgctaatgcaataaaaaaagaaactgttaatttagaaagtaaatctttagatgccttcttaacaaaagttaacattaattccatgacagataatctaccagcttgtgcaggatatttcaaattattgatgataagtttaaattgtttctctaatctacctctactttgatcatattccattaggaaactatagaaaacacttcttgcaacttgtctaatttcgttagttgtactagtaaccattaacttggagacaacatccatacaatcataaatttccggaatcataatgtgcttaaacataatactttttaagaaaccaaaggcagtaccttgtctttctggggaatctaaatcaggctcaacttttttcaaaataaaactaatagcagaatcttgtaattctaaatcattcttgaatcttataacattactgaggaatcttaaacaattttgacaaatttcattattggttgaaggcatatcttgaataatttttaaactgtcgtttgctgcttcagtaaatttactatcagtttctggtttgaattctaatctgaccagcatagttaaaacttttaaagatgaaataacaacaccttcatcatctgatgataaacatgattgtaagattggaacaaatggttctaaataagatgccttaaataatgtatcatgtttagaaattgcagtttttaataaatcaaatgaaaattgttgtaatgtagtaacatataatgaatattcattttgagttttttgagctctagcatctaattgaactaagaatctctcaactttttcatctactttcttgatcttttgatttctcttagcttcaactatttcatcagcttgtttgaaaatttcattacataaaattaaaatatcggttgatgaaccttcttcgtttctatttaaaccatgagcaaatcttttcattaattgttctaattttgcttgagacttgaatgataatctttcgttaagtaaatatctgacgggagttaataaatgattgaaatcttttaaataaatatttgcggcaattaattcaccagtatcaaaacttttgttatgtttaatttccttggctttgttactataaccagttgcttctttttcttcggaagcttcaccaaaaatatcattcataatggattgcataatcatagcaactgaatcacctaatgaaccatgatctaaatatgggctcataattgtgagaatatgatggatagtaaaacttaaaatgtgaatttgtggacctcttgttaatgcacctttcaattctttaataatgaacttcaaatagtttggacctaaaaatattgcaattctacctaaatgttttctaaccgaatctcttaagttttcggatcttgctcttaagatttggcaaatactagttaataaaccagcaagttcagtatcgattttttcttgtgaacaacatgtaattaatgaaatcattgcttccgaaactggaactctaataacaacagtatcttcatttttaacagacataatcttttgaagttttggaattaaatcttttgtgacatattgatcaactttttcaattttaggataatcagatggttttgtttcaggttcactaacccatgatctcattgcagaagccattgagacaattaatagaatagaatctcttaacttttcaggtttattcttagcttgtgaagtattcataatattaatatatctagtcataattgctctgaattgattccatgatacgtattgaataattcttttaaatgcagtgatagtttcattggcaacatttctatatttttcatcagtccaaaatgcataatgttcaataataggcaaaatataatgtgcaatactattggatgaaagattatgagctaatttcgcaatagctcttaatgatctttgtcttttataagtttgtaaatgaataatatcttcaaaaaagtcactttcttcatcttcttcttcatatttcaacaacactttcatatcatcaaattcatgatagtatttgatatttttaacaatatgattgaaaacacggacatattcacctctaacaagttcattcttttttctcaaaccagatcttatagctgggataatcagttcttgaaattgtgacactaattcagcagcatcagattcagataattcattcatagcatcaatatacctttgaaatgtataaccagcagatgatcttaacgattgatcattttcatcattaataaaaaaacaacaagtatataaaactggaatccattcaattgttgataatttcaaatattcagtttcattcaaatcactgaaagcttgtaaccttctattgtaatcaggttctctgaactttttagaatcatatgcatttaaatcaatgacaagttgacaaactttttcaagctcactaaatctattattaacaccatagaaaacggttgaaacaacatttctcatatctgaaccttcacatgtactatacaacttggaaacattagaataaattggaataatttcattgtatgaacattcataatcttcaactaaaattgcaatcattctaacaatatcaattttaacagaggtttcaatttgagtagcaggtttctctaatgctttagttaaggattcaatcaatacctttctattttcattatcagtaacataatcatttgaaacaaacaagagtaaaacttggacagctaatgaattaacattattattggtactattttcaaaaatcaaaactaatgaatctaaacaatcagaaataacaatggttaacaattcaatgactttatcatctttggctggtaaattaagtaacgcaataatgaattctaaaatcagaactaaaacagtatcttttgcatttggattaggtaaaatcgataataatgttttaattggtttataatcatccatgtataagaaaaataatctacttggaacacaccatagcttagtcataattttcattagtgaagatgcaccacttaagttttcttcagcaaatttatccattttagatttaacaagattgttgtaaatcaaatcaccagtaatttcccaattgtaatcttcacctaagtattgcattatttgatataataatttaaaacctgattttcttgcattacgggcagacttttcaataattgaatcttcagtatattcttctttgttctcaatagcatattcagcaatagataaagagtaaattaatggatttactaagacagataaacattgtctatgatttctacctaaagaatcagtaacttccaaattcaagttgataaaaccatttatatgttttaatatttttctattaacatcattcttttcaacaacgccatttgagtcattaaatttatcaaaattgaatctgccataggttaactctaaaaattggatgacataattatctgcaagattgttcaaagattttatagcagcaatttttcttccagccttggtactatttgttttaacagtctgagctctaccaaataaaattcgtaaaaccaatggcattaaaacaggcatatcattagcttcaataacatttttttcattattttgtaaaaatataacaatttcatctctaaaaagggtatcatctagtaaattgttcaaatgtttttggtatttattgaaaactggattatgtaaattcaatacacaacttaatgctaacttttggatttcaatttgtctgtccattagtaaagtgagtaacaattctttaactttttcaattgatggaacttttggtaagtttttaaatttagccaataattcaattaatccatttctatcagtcattgtccaaccttgtaataatgaacctttttgggcatcacctatatcatcagcatcatcattgactaagaatggaactaaatcattgaagttagattcagcaatttgtgggattttatttaataatttaataacttgatatctgacaaaatcagtgggtaataaagattttctttttgattcagtaaattcaataattgaataattaacattttcatatttgtggtaaattgtttcttcaaagttagtaagaatagtatgcaatcttgaatcttgtggtaaccagttagtaatatctgatttaacatcaaattgatcaaactcataatcgagatatgaagtttcagttaaattttgataatttaatgaaatgaattctaaagctaattcccacattaaatctgaaacttgattgattgtagagacggcaaaatcttgaactccttgccatgatggtgaaaatttattagataattgaccaaataagaaattacaaacaatattgttaattaatggtgattgatttgaataatcctgggctaaatttctgaatcttaaaggaacatctctggcatattgtaaggttaatgggatttgttcaatagtacgacatttcaaaacaacatctggaatttcatcccctgatttattaaaaattgaaatgatcaaagttaaagcgcattctcttgattcgtgagaaggagattttagaatttttgataatgataagatagttttagctttttcttttttaataaattcaatagatttagtattagttgaaactttaatatttgaaattattttttctaaattttgtacaaataaactactgcctgaaagagtttcgagattttggaatgataatgttaatatttcatgaatgtgattatctgataattcttgctttgttaatgcaccaactgtagcaccatagacatctaaactgaaaaaatcggagtctgttttactttcatgtaaaagattcaagaatttaattaataaatctggatcaaaggatatatcacaaaattgtaaaatgagtaatctccaatagttgtttatcaaagcgtttttattctctatggattgaatatttttaaaggactttaagatgaagtttttaaaatcagttggaataattatattgaatttatttgaatcatcattagttttagcgattaaatctttactattcattttagataagaaatatgcggtttctttataattatccttccaattttgacttatgaatttagtaactgatgttttaacaaattgtacagttctgtccttatttaaatcagttgctgcatcaatgaaaagtaaaaatactgatccatcatctaagtttgacataactcttataatattaagatgatttttagttagtgcttgtatttcacaatttctcattaaaactgaacaccaagatgcaaatgaatttgtgaaatctaatttatggttaactgtattaatagactcaatttctttatttgcagcttcctctccttcttcctcatcttactttatcttcttccatgtcttcatcacttttaatagttaatgaagtaatcatataatatttggacaaaatttaaaagatcagaccaatcaacaacacgtctacctgattgagcaaatgataatgtaagtaaaacttgtgaaacattagttaggaaaacgtaattaatattagatggttccgatagttcttttcttacagcagtttgagtagttgtatataataatgaagagttttcctttgtttctgtataatctaataaatccataattatatctgataaaactgaagtgaatttaggatttttcaaacaagtttttataagtgatggtaagatgataccggttttggaatgcattacacctgaggcacttttcaatgactcatgtaaacataagtcgttaaagcaagatgataactatcattattttcttcattatttagtaaagcaggagaattgaatatatcattgataaatgattgtaatgatgataattttgattttctaattaaaaatgaaatagcttcagaaacaaatctagtaacataatctttatttttaacagttaataatggtaaaagagaattaaaagttggaattaaatcagatgataaaatttttgataagtatttgaaaatataagctaagcaattgaagattaattctaaagattgaggatcttttgaattcaatgctatttctctaattatttctaaagcacgaggatagaattccatgaagtcatggacctaaatcagtgaacaaattgtgataataattctaatgttggttgtaatgataagttatcatttaaaataagtgttttatctaaagcttcaaaaatagtttttttatgataaattaattgaggtaaactcatggaaataggttccacaatttcaactagttcttggaaatttttagataaattaacttccctccaatgttctaaagttgatacaaaatgtgaaatttcagcatcatagaatgcttttcttttaatatctttcaaagggtcaattttaatggaatccaccaaatctctaaaagatttatacgaccattttctagaagatgcagtctttgctgttttcttcaccatattggatgtattagtgtctttactaggtaaaatatgttaaagttttaacaaaaatctatgaaatcagtgatctctaaggaaaaaaattttaaaatttgacatgaaaattatttagcaaaagttacctatttgggaaacaaagaaaaaaaaaattatcatgaaaagacgatcgactgggggttgcttgttaaaggtgatgtaattctttgatataggattagtcttctacttcgccaagggtgttccgtatatacattaaggaactgaaaagggaatcattgctggtagagaatgagtagcaaatcagagacaaccccgttgattacggaaaatccttatcaaacacctgaggtatttgaaaatgaactgaaaagaaggactaatacagcaagtcaagtgagttccaatacaagttccaatgtaaattctaatactgaatctaattcaaatacaccggtaaatggaacaacaaccacatcagccacaagctcaggtacttcaaagtcaataacaacgaaaggtttagggacctaatatgacaccacaacgatcttcaagagtgatacaaaaacttaaattattacctgaatcattagattatgaatcaatagaaggagatgaagaagtaaagaatagtacgaataaggcagcagcattgaaacaatattcattacaaaaaattaaggatcgtaatgcaaggaaagatgcagagagattaggtaagaaacatagatcaatgttacctagagttacaacatattgtacagctggttcatataaaatgagagattttattagatggttgaaggataagaggaggacacattctacagcacctaaattatttgatgaatgtatttatacaccattcaaatttcgaaatattaggaagaatagttcatcaagtcaaagaagcaatgaatcaattgaggatgggaattctaatgatgaaggtaaacgaagtagtaatggaaatagtaataaaaagacagcgattcaatttgatgatgaaggtggagttattgatttaggtaaaagaaatagtgatattttcatatttgaatatggagttatagttatgtgggggtttactaaaagagaggagagtatattcctttatgaattagctaagtttgagaatgagaaattagcagatgaagatgttcaaaaggaagaatttaattattatattacacaaagttatcaaccaagaatttataatgattttattacattaagggatgattctaatcatatgttaaaattaagtatatcatatgctatatcacaaagtgttaagatatcattatttgaagagttagttgataatacgattgaggatacacaagatataccacaacaaatttcacaaactggtaaagttaagatgacaagggaagaaattatgaaaagtattggagaattatttattttacgaataaatattaatttacatggatcaatattagattcacctgaacttatgtggtcagaacctgaattagaaccaatttatcaagcaactagaggatatttagaaattaatcaaagagttgcattattaaatcaaagattagaaattattagtgatttattacaaatgttaaaggaacaacttggacataataatgatgaacaattagaagttacagttatattattaattggagctgaagttttagtttcattaattaatataatagttgatttatattctcaaaggaatttgatatatttgtaaattatagtgatattttgtaattttaaaaaaaaacatgccatttattataaatttaatataatataaaaactaatatacataaagagaagaaagaaaagagaaaagaaataagactagactagaaatgaattataattcttgagaagcctttgcctttgcagttttctttggtaataaagattgatgaatatttggtaagacaccaccttgagcaatagtgacatgacctaataatttatttaattcttcatcatttctaattgctaattgtaaatgtcttggaataattcttgattttttattatctcttgctgcattacctgctaattctaaaatttctgcagctaaatattcaaggacagcagtaagataaactggagcaccagaaccaactctttgagcgtaattaccttttcttaataatctgtgaactctaccaactgggaaagttaaaccagccttagaagatcttgaagttgaagttttttcagaggaacctgctttaccacctttaccaccggacattattatttatttatttgtagtttgtttgtgtagggatagtataaaggaaatagaaaagattaaactatatacatgaatagaggggaagtacagcattatttatataataattgaaatcatcatatggggggatcaaagtcaatgtcaatagatcaatagtataataaaagtgattacatttactatgaagtgcgaagtttaaaacatgttaaatcaatttttttaaattaatttactatatttaaaagagttctaaaatttacacttaaaagtgcgaaattttataccgccctttttcacaataataaatagtcttgatagatgagccaccctccctatttattttaaagtataaatacccctggtatgatcccattatttgggataattttataattattttgagaacttcttcttgtagtaaagtaaattatttaccttagacatatataagcaatggcaccaaagacagttgcatctaaagctccagcagaaaagaaaccagcaggtaagaagactgcagcatcaactgatgcaaagaagagaactaaaactagaaaggaaacttattcatcatatatttataaagttttaaaacaaacacatccagatacaggtatttctcaaaaggcaatgtcaataatgaattcatttgttaatgatatttttgaaagaattgcatcagaagcatctaaattagctgcatataataaaaaatctacaatttcagcaagagaaattcaaactgctgttagattaattttaccaggtgaattatccaaacatgcagtctctgaaggtaccagagcagtcactaaatacacttcctctgctactgcataagcaataccctatataataataatcttttcataataataataactgtatactagctaataaaaacaaatataataaacattactgtaaccaattaatttgtccaatcaaaaaaaatgtcgcgaatcctctaaggctcttaactatggcttccccccggttgctctctctatattgcttattgatcactgatataattgattaatcttaatttatatcttggattatcttggattatcgctaatttatcctattttatcctaatttatcttaaattatcctgtgctttcttttgcttatttctacattctatatccatatacaatgaatcttaacacccctaatcaagataatgatccaatactctctatcctcaactatctcccgttcaagttatacttcaaaagctgataattcactcatctttgaacgtttagttcaagatcctttaactgatgctcaattaataccacattctttacctcgtcatatatctgctgaaactttcattcctgcttccttagatacaactactcatatgttgaagaatttcgaacttaatgataataataataataataataataataataataatactaataatactagtatgcttaatagtgttactttaaatactataaatgataatactatccaagatgaaaataatttctttgatcaaccggatttaggttttagtaatcattcaagacgttcatcattggctaatttagaagctgctttaagtaattcatcaagaagaccttcatcttcaaatttacaatcaccatcatttagtttaaattcttatagatttaataataattcaaataatttatcaagatcaaatacaaatacaagtttctcaaatttaactcaacaattacaaaatcaatcatctacttcattatcacaaactcctcaaaatcaacctttagctcattctcaatcatataattcaactttacctcctttaacaaatacttcaacaaatgatccattatcaacttcaatctcaaatcaaagaaatcctcttacttctgcaagtccaatgatgaaaaataagtctttttgttcttatgctgatataattgctcaagatgatcaggaatcaaaattttcaattagaagaccttcaatttcaatgtctctatcaaatcaaaaattagttagaactaattcaatgaattctcaaattgatattaatattaatacaagtaattctccaagatctccaacatctattaataacaataaccctttcactaataaaaatattagaactaattcattctcaaatattagaagaccttctccttcaattaattataatgtttcatcaaataatataccaacttatgatgaacaaaataatgagtttgaaaattctaatgttttcacaatgtcaaatactccaagaaaatcaattgcaggattttcaggtagatctcttaaatacttattcatcaaaagtattatccaataataataataacaataataataatactaataataataataatactaacaatttttcaaaaacttcatcaaatattgataatattttaaagaagaatacaattttaaacaatattaatacaccaccttcaactgcaaattctgtatcaagttcaaactgtcaaaatttaaaacaaaatataaattgttcaaatgattcaaatattagacatcctaataatttagattcaaaagatatctctcctcaatgttcaagaccttcagatgatgaaagtattaaaagttttaaaactctcagtttagttacagaataattaattattaaataaaacaaatttacccattgcacaatataaacctactcattaatatttcactcatttaaatcaataaatttatttaaaatacactatttattatgcttgattttctcttttttttttctattctctttccttaaatctgttcttttcattttttgcgttttatctatgatttacacacatgtgtattgtatttttatcctttgttcatatgttttataaacttttttgttatttatttccttaatttattttcttaaatatatatatatatactaaattatttactataatagttcttactaaattacataaagaaattatagatatgaattttcaatatattatttattcattacttaaataattttttctattaccagttctgacaaatcttctcaacatccattcaacatctgcatctttatcatccattgtacctaatctaatttcaaataatctcatttcaaatctaggtccaacttcacttaattctactccatctcttgtctttgcataaatatgttgtctaacactaataaaatcttcacgatttataaaactaataactcttggactatcaattttaacacctggtgggaataaatgttttaaaattgttgaacatctttcacctaatttactactaaaattttcaaatattaaatgtggataaacttcactttgatttgtaacatttaataaatcatgtcttaaaattacattatgtaatgtaaatgtaactgttggtccatgtggtaaatgagttattgtcattgttgttggtacacctctagtgttcatgtaatacaattaacatccgttattcctgattttttacatgtatcaattaatgttggcataacataattaccacgattaagtctaacagcatttgggaataataatttaatttcttttgtaaattgtgataatctagttgatgggtttcttgacgttgtaattataattcttggttctattaatccagataatgcagaatattcatcatctaattcttcattggatttttgtaatgattcatcatagataaaatctttttgtaattctttatcatctgcaacttcctttgataatggtttaccgcttgctaatgctgctgataattgttgtctcttagctatagtattttgttcacgtaattgttgtgctttcctgaataaatattcacgacgttcacgagcttgctttcttaacatattatgctgtattatatatacctgttgcttaaagagaaaagtgtataaagataaaataaaatcaaaattatttttaaaaatgaaatttttttttcttttcatgttaacagctgaaaaaaatgtcaaaaatgagaaattcaatttcctatagtaaatcatcaacatgtataattcactgttcagctctctctctctaactgctcatgtatcaacctttttcaatagataaacataatgttggatatctaataataaattatgacactaaagaaaagaccaaattgaaaattatagttacagatactgtaaattattgtaagcaatatacttctcaaacaaatgatgaattcatgagtaaaacatttgatataaataagttatcaaatgatgattatacgataattgattcaatctatgagaaattcatacaaatacaatcaagtttcaaaccaatcattaataaaaaggataaaatgattgaactaaatgaagatttagatcaaattaccttatcttataatgaatttaagtatacacttcccatagagacttccccaatagcagatgaattatctgcgttaaaactaataaacaatcaaactttgaaattcacacaacttcaatcacaaattaatgggaaactcttaaatgaattagattgtaaaaatctaataataaatgaattatccaatgcttattattataaatcaactatttcgaataataatttatctaaggatgaaatatacaggagtgattgtatacgacaattattcgttaataaaacaatgttaaaacatttatcaactacaacggagtcaatgattcttgattcaatagatgctttcgatacaagtaatcaaacattactttataatactgaattcgaaaaatattggaatgcaataaattctaaatccaaaaatcatccagtaactgaatcttttgaaatccctactttatcacaatcggaatcaccatcacaatcacaactggaaccttctacaaagaagcagaaatttcaagggcttttgagacgtcagagaaaacaaaacacaagctgaactttcctaaatcattcaatctcattgattctggtatcccaccatttacaaatttgtttcaatgcattttgttgttttaaatctctttttttataaattccatcaagaaaatcactccaaaatgtaacaaaatcctttaaatcatgaatattatttgataaaaatacaagatcgtctctttgtttcctattttctaatactttcattggattgaatcctcttctatcaaagaaatctgcaaatgtcgaaaatcctaatctaactatacatttagctgcatcatcaaggttatgcattctattctcatcataatcaattagtcctacatcatcaccatatattgatacaactgcaaaatttatagcttctaaaactaatttggttacttgatggtttatttcaagtgatacacttttaatatcatttaaacgtggaatttgttgttgtgtctgtgtcgttttattctcattgtttaaatccatctctaaatccattgcattctcattatcttcaatttgaaaactattatcgtaataattattttgaacattattgaaaccattattgttattgtaattgttttgattataattattctgttcttgaatattattataattattgaattcttgttgatagttattagaataattattaacattttgctctagttgaaacgcccgatgttgttgtaattcacttaatatattactagcaatcaaatctgctgtcatttctggtctaaaactgattgttaatatattgttgaccaatgccttaacacataaatttttatcatttgataacagcacgaccatattgccacctctgttttcaacattttggaaatataagcaacaatctaaaatagaattatccttacttgcatccctatcaattctttcatgtaatctctgtcctgtaactgttggttctaattcatggaaatgtgaataacaccaatcaattgcctttcttgcaagtcttgaaattgaatgatgtgatgaaattccaacagatttacctgaatcttttaaaccatcaagttcatgaacaacttgttttggtataattatttgatacacacctgcatatttaccatgtaataatttctcaagatcatcaagtaatgataaattacttaataaaaaattcgtatcaactataaggtatgcactgtagaccttgtttgagtttaccggtgtattactttgttgaaaattcgacatatcactcggtataaatacatcattatttctcatatttcaacacatagttggatatctcatcctgttcattccatctttagagatcaagtgttaccagaaaaaaggaattctcgaagacttttgtacctgtcaacatgacttcgaaacatgggttgaaatttttcagacgtttccaggtttcactttctacgatcacggtttcattttcttttaacgatctactggaattttatttaaatatcgatataatactttactatacataactcaaggtttattggaaaatgtcataaaagacttatccatcgcaatttcatatgcaagatcattttgaaaatctaaatataatttagctggatcaccttcaactgaggcagtataaatagccttcagcttcaggtatgatttgttttatattacctgcatttactgcttgcgtcagcaagtaattgaacttcacatgatctttcgagtaatgtgaataaataagctgcttcatcaactgtttggcctgcagttaataacccatggttttgtaaaataactaatctactcttatcaccggctgctttagcgattgcttcaccttcactgagttcgattgcaacacctccaaattcactataaacagcttgttgattatgaataatacagacatcttggtttaacatttcaagtggcttaccaaaacatgaaaaagttttaccaaacttggaatgtgtatgacaagcagcattgatatctggtctagccttatgtaatgctgaatgaattgcaaatcctgctgcattgattggtgctgtggtattaccaccaacaagattaccttcttcatcaactcttaaccatatctgatgcctttcaataatgaaaaatgaatacctaatggattgaatccagaaagtatttggttcaacaggatctctaacggaaatatgaccagcagaaccttcagtgtaaccttttctaccaaagactctgaaagcacctgccaaatgctctaatatccattccctttctttatatggatcatcaaatttaggaatttgatgtggatttgcgttaccgaaagataaggtgtcaacacctgattttttcaatttataacccttagttgaagcaacttcaactttctctgggaaattcattgtgttaatagtagtttggatctcagtcattttgccttacgagatattacagagttgataatttgttctcggtagcaaagtaagctatttaaataaattgtttccacggtttgttatcagtgccgcaatcttagattaatcagtcgcatatacccttttgggaaatattagtaaagtcatcttattatattggtactttaagagtttattagctttaagtagatttgttgtaaaaattactgtgtttatagcatggtgttgtataaaagatcagttagatactcagaatataaaggaaagaataatagcaaaagcgttaaaagtacaaaagcgttaaaagtaaataaatcatttgataagaaatgaattatactttttgtgaaaccttagtaaatgtcataaaagaatcatcataatgtttttctaaggcaagatcattttggaattccatgtataaggtttccggatcaccgttcatgtaagcagtataagcagcttcagcatcaccaataatttgcttttccttaccaccagcagctgctgcatcagcaagtaattgaacttcgcatgagttttccattaatgtgaacaagtaacctgcttcatcgacagtttgacctgcagttaacaacccgtgattttgtaagataacacatttattcttctcgccaactgctttagcaattgcttcaccttcttccttttcaattgcaacaccaccaaaatctgaataaacacagtgagtgttgtataaagtacaaacatcttgattgatcatttctaatggtttaccgaatgcagagtaagtcttaccgtatttagaatgtgtgtgacacgcagcattgatatctggtctagccttgtgtaacgatgagtgaattgcaaatcctgctgcattgattggtgctgtggtattaccaccaaccaggttaccttcttcatcaactctaaccatatctgatgcctttaataatgaaaaatgaatacctaatggattgatccagaaagtatttggttcaacaggatctctaacggaaatatgaccagcagaaccttcagtgtaacctcttctgccaaagactctaaaaacgcctgccatatgttctaaaatccattctctctccttgtatggatcatcaaatttaggaatttgatgtggaactgggttacccattgaaatattatgcgcaccttgagaggtgactgtgtaacctttagatgatgctggtttaacttctgttgggactgtggtagatgtagatgtttcagttgcactcatattattcttaagattgtgattgttgtaaataaactacatacaataacagcatccagctcataaactctaatcatcgggggaagttctttactttttatactgaaattttccaattccgtgaaaattctccaaaagcggaaattagcgctacactgataaagaaatcttgctattcttatttattcttattatcatgatacttagctttacctcagacaattttatagaattagaaaggtttaaaaaattatagtacttaacttagaaattatcccatttatcatcttcatcatctttcttaggaaccgttgaatttactgtattcccagtcctggaagacttgtctcctttgcaggtctttgaattccaaaagcaggttttgcagtaacatcatcagaatcttgtggattacccaatccgtcaaataaacgtccatatccattattacctgattcttcataaaattgttgttgtaatgcagtaccagtttcactaactttttgtccaaattgttcaactgctctcttagcttgaattgtataatcttgttcacctaactgtttaacacctggttgaataagattttcattaacatctttaacagatttagcaacagttgatgaaaataatccccaccctttagagaatgtaccaactggatcactttgaaatgcctctaactgtaaatcctgctaatgatccacctccgttatttgaattattattatttgtattagggtgctggtgaactaccaaaaccttgatatttaccaccctttgatggtggtaaatctgctggtctagaatcattaagattaccaagttttgcaaaatattgttcatttgcttccttttgtgatgatttaaaatttgaaagtactattgtttttactgcttatatttagaaacatcattgctattattattgttgttattactgcttttcatttgatgggaataactcatcattagaatgatcatggttcagtccacttgctcatcattaacagcagctgttaatttagatttataatcttctgcaacataattattatattttttacttgcaggtaatgataaatcaattccatgagatgtaaaatattcaccacaattctcattaccaccaatttccattcttttcaattcttcaggtttgaaattgatccattgtaattgatctaacaaatgaaatatgaacacctaaaccacgatgaatacctgcacattctaagcaaatgaaaataccaaattttggtgatgcccattgtggatttggtgcattacaatcaaaacattttttattcggttggttgcttttgtaatgctaaaagttttcctacgtgtatcaggatcaacactccattgatttgacataggttatttattgaataatgaatatatttgaagtttaattacttaaatcaaaagatcttaaaagatcctagacttttgacattggtttgatctaattcaatatttacgtccaaattttaaaagttcgtaaaatgtatagtcgcgtcgcttatggtgtaattatcttgtaggttaggtactactattaatagccaatgtctaaagagtggttaaggttatataaattgttatagagaactatagagaactatatatgactcaaaatgaaagacaccatctatgaggtaatcaagtaaaagaaagaaaggaaagaaagaaagtttggtaaataatttgtttgtatgccagtgaaaaatgatttttggtatatttaagatattttaatttgaaaccagtatgtatgataaagtaggaaaatcatcctgggatatataaatagtgataatgataataattagttaattctaattctatattctatatttaagtttaaatgtagagagcacttaaaataacataaacaactgagtttaataaagtacccataaatgaatttggaataattgcagctgcatcatttctatgagatgttgaagaaattgatgaaacagtagctgattctgatgcctgtgctgtaatagttggtggagcaattgaaattgaagataaagttgcattttcttctttaccttgttcagttaatgatgaaatccatgtagataaattagaattatcaattgatgaatctaatgatgtatcatttgaaaggaaaactgtaatggtactatcttgactgaaaaataacaccacctttcattgttgaacctggagttctttctaaataaccaaaattttgtaaaccagttccaatatcatcagtaccttggaaatcatgaatagtagagtagaaattatttctttcagtgaagttcataacttcaaagatatcaaattcacctgaaccagtattccatgaggaacaattaccatttaatggatattgagaagttcttaaaatatgagcatttaataaccaaattgctggcatatcataaccatcagttttattttgcttatcatcttctgaagtatcagatggtgcattaaattcgaaaaggaacattctatttaaaccaccaccaaaaccatgatatgcttgaccatcagttctataagcaccacaatcagatgtaccattacattcaatacctgaagcaattgcaaattctaatgcacttggaattaagacatcatctaaaatttccgatgaatctgatttttttaaaccatcagatgatacaaaatcagctgcattaccaagacatgtattttcatgaccataattagctaagaaagtaacattatcagcagttttagattctgaatcataataagctaatctttcccaagaacctgaactttgattattttcataatctgaagttgtataaaaaccgaatttttttaaattcattggacctctaaaatgaactgtcatatcaccatctaatggagctaatggaccactaaaggtaaaaggttttgataaatctttttcacaactacagttaccatcagataatgcttcaattttactaactgggtaatagtaacctgaatatccgacattatcaaattgtaaaatgtccgcttcagatgaaaatctacttgcttgagcagttaaagctaaagctgtgagggtgagcaaagtgttcattgtgttcattgttttattgtcttttgaagtgtaaatgagcgctcgtcaaagtaaaacaaacagagaaacaagttaaaaagaaaagagttgtagcttgtaccttgtttaataataaacatcaactgaatcaataatacttactcatgcaaaaatttcctcgctatttaataaagaaaagaggcgcagtgaaattttaccgctattttatttttagatcttagtattatgcttctatattatgtcatttttattatattattaaaggtactcctcatatcaaggtactagtgttggattgatgttattatattggaaggtatagacatgactttaaatgtgatttggaaaacgtttaaaatgagtaaatcacctcaatcacagacccaagtttggcagatttatcaacatgtcttatcaagggtgaataatccatcgttaaagcccctttttgttgattttgtagttcctcataatacctattacggtatttcatcatacatgaatcaagtacaactatcttttagagtaactaatcatgaggagaaagtaattgtggaaaatttcgtcaaggaaggtttgacacccgttgatgatgtttcctttacattaatagaaaattgcaaaggtcgtggtaaacctgttagtatagaatgatattcatagcagaatttgtgtgtgtatgatagaatatatagtcatgttttaatgaatttaatgaatcaatgttagcatttcactacacgtacagcaatggatagtaaattcacccgccgcttttaatgcggcgcatggtattgatggtttatgttaacatgaatttatgttgaaaagattatgtatatacattgtagttccttttcttcttacaggtacatcctctattagaaatgacagataggaggaaacagtctggtgatgattcaaaggctggaaagaataagaaattggaactttttgtgttgattttcacacttcaaaaagtggaatctactatcattaaacaaacagattcaaactctacatttcaagatcaacaaattcatttgtctgaatgttttactcaattaatgcttcgtggtccacaactactaagatctgaagggggatgaaagctttgtcaatatttgttaattgtatcaaacatgtttcaaaagttaatgaacaagcccttttattgattattagacgattcgataacgcatatctaagtcatttatttttgctaatagttgataacactgagggaaatattaatgaaaacaatgttttaaaagcggtatggtatcaattttattcgaatacaaatgaagattatatattaagtagttttttcggttatctttttcagttgaaagataaatctggagttttagagtttatgatatctaatccagatattttgataacatttattgcacgtttgatacaaaatttaaaattaggagataaaactactaacataaaaactttaaaaaagttgaaatactgtcgaaatatattgactgctcacacagatcttttcgatattgatattttggatttttttgttcaaactttgcatagtacgatattgaactgtatttccttcaactaaagagataaggtgttatgtttatgagatttatgagatgttagatcactgttttctttgaagctggacgatttggttgcttgtgctaatattgataaaatattgcaacacgcaattgaaataaatgatattgatttccagagatatatttctttcctaaagagtaaatctactgatataagatgggttaccaactcaatactttcattagagtcattattattccgagatatgaaaaatattgcatattcctcatcatcttcaacgaatacaaattgggatcaatttattcaatatcttaaagtttttgatatgttactacaggaaaatctgatgattgagaaaccactcttgagattgctttttgataaaattttgattactaataaactcatcattcctaaaacatatcatgatgaagtggtacttcattcttgtcgaatagtaacttgtgcatatcaatcagataatgttccctttgatcatattaaatttttccaattgttcctctcatatgcgacatactctatagaaccaaccttaagaatggttgcctctgaagctttgatcgcaatcgtggaatgggacccaacctcaacatcatccttattcaaagaggaaaaaattgaatcagtcaaacgcatcataacacattcaaccaatacctcaaagtattataatttaacgaaaaagatttatgatttaaagaatgataatattgatagctggaactttattgaacttatttatttatttgctaattttgaatctacagatatgaaagttttactaaactatcaaaacttgatgcaaataaattacccaaaaaaactcaaaacccaattagcttcacaacttgagactatactgtcctttgatggatttgaaactctatttccgagatttcctgagtttgttaaaaaattattttgtttcaatgattttaattcatttaaagaagattttacaccactataccctgcaccatctaaattagagattaaaatttatgcctttattatgctgatttctcttaagaagacatttgttgattctgatatcatgatagctgatatgtttagatacacagacgaagatattatgtttgcttttggtgaaattttcaatacttacacaattcctacctttattttgaaaggtctagttaaagaactatcaaaagggaatgatattctgctcaactttataatagagagtccgtcattaatttcaagtttcaaaatttcagatcttaaatttgatctttttaaattgtgtatgaggttgccatctgaaaaatttgttacattcgttagattaattctaactataatgaatgaatcatcagaagctagcttgaaagtctttccgccagtagaaagaaatgatggtcaattttatgcattgttaagatcatgtgaatcttcgtatttaaattggagtgcatcttcaagaatcagattttgggaatcttgtttaagtggttacttttctggttcaaaatattcagttgataagcttatagttttgataactcggtttttaacattactaaaaggaaactctgattatgttttcataaatgataatactgttataactttgagtaaaaagttctttgataatgcaactgatgatcaattggacagttatttgagcaaaaagatgaaagagttaaagatgctgaaatctaatttcgaagggtgaaaacaagagtcctcataatttataatgataataaacaaaaagatgatgttgctggtatatcaaaaacacaagacattagattagctgattcaaatgaaactattaaagtgttgattgaggttttcccaaatggacgcaaagttaatagtcttgaaggtgcagatgaagatgatgaaagcctgaaaaagctaactcatgaggaacgaaggttctattttaaagagaaacgtaaagccactaaaaaccgtgaagttaagtctaaaatagtcaactattctgatcattttatctcaataattgttgatgacttatttaaagggatattcaataagaagaagagtataggtaaactaattggttctctgttttattcaagcgttaatttttccaaagcatcagatacgcaaatagcagaggtcttgtctgcctttcatattaaaaagaataaagaccatttattggcgatgcatctttatgtcactttctgtacctacttaaaaaagaggaaattattgacccctgaattacaaaaactttctcaaaaagctcaacagatgactcaactaacatagaacttagaatgactatataacaaggatatattttatagaataatgtgtttaatttattttttgattggttcatcttcggttaatgtagtggtacttgttatagtaccatctaacgcatccttcaaactgatattaccacttcctctaggtgccggtttagctaaatattttcctggtttccaaccaatcatgtatataaaacgatatgttgcaggtaaatgacctgtaatccttatcaccgtgtaattctctataaataggttcaacagctaaaagtaaatctttagttaaagcaggtggactcatcataactgaattgttttctcccattaattgtaaatcttcaatcaatgcaagaacgtttggataatcaacaattaattcctctgcatcaactgttagcatttgaaatcctgccttttgcattaaattaccaacatccgatgattcaacaaatggtgaaatacgtggagatataccaccatatctttcaatttcagctaattgaagtgctgtacgtaattcaaaaagtgtatcaccaccaaacattgatccaataaaacatccatctggttttaaacaattgtataacttcttataaacttctggtaagtcattaatccaatgcattgatagattggaaataatcaaatcatattgatttttttctgatagttctggaacatcaaaattctcttcatctgctacgattctttctaagtttagctctttattaaaagctgaatccatatctttgaaaagcaaagattgtgaagattccactaataaaattttacctatttttgacttaattaattctctatctgccttccattgaggatcaactaaatctctagatgaatcacataataatctctcaaaattacccgaatgagctccaaaatccaaaacattagtgaattctgtttttaaaaatgctaatctgtcaatagtacgacgattaatttcgtcacgtaaatactctgcatgtttggagtctgggttatgtgcagctctttctttttgtaagagttttacatgtctgtcaaaaactttaatagaagaatttcctccatttgacgaataatgtcttcgcaaaaaagtattccttacacttttgaacatcactgaaagaataagtatcagaaacttctttgtggaatttaagctaggggccgtaagatagaaaagaatgagattttattatacatggaaatttagttagtaagaattctccgcagtacatgaaaaataatgttgactgaaaatttcatcgtgaattcatgttactcttgttttgatatataacatacaagatataggggctttatacgctacaatgataataacatgatgcaaaataatattcgaaaaatgctattcaacaaattaaaagcagagacatccaaaaatgataacagaataaaccaaattgaacaaattgtcaagacatcatcagaaccatctacaactaaaatgaaaaaaactttgaatattttaaattcaatcaacccaggagaatatataggaaggaacactacaagtttgtcgaacttaatttttatgaaagaccgtaatggtgattatagtgaacaatacaaagacttcttaaaaaatcatgatttgacaattggctattatgaaatacccagactccttcactatggacagtatgaacaagcatccttattagcattagctgaatataaaacattatcacaaaatccagatcttgaagatgacaagctaatgcactctttatattttcatgctatactagaagaggcatcaaaacgaaatgacacgatcatgttgattgaatacatcaaactgctccaaaaaacgaatagtatagcagctgcaaattatgggaatataatagtgaatgcaatactaaatgaaaatgtaacacttttagaatttatacttccaaaagtgatgactaaaatttctcttacagataatcttatagagaaactttttgattgattttgaaaaatgaaaaaaatgatttagctcttcagttattatctatcgttcaatcagaagatatcaagaatagattatgtttgaaattactatcaggtttagaatttaataactgtatgagttacatggaaaatttaatagaatcaaatattctggtgttgccttctaacgataaactaccagcgtctttcatatctattccaaatttaaatgatttcactgtaatagatgaacatctagatgttttaaaaagcttgaaattaaaagaaactaaacaaatgtacctttattcactgttatcatctatcaataatcaaaacaatcatttggggtgtacaataagactactcaatggtattagagaagaaacacacttattaactgaggagcatcaaaacataattttccaacaaatatctaaatattcgtataagctcacaggcattaaactgatgcattatttcaaagctttagggttgcctatttcaaatggataattattttaaattggttaaatgtcagtttggtggaagtgaaaacgaaactgtgtatcccattttagtggaaaccataaaggaacacaataaattatcatctgaaattgtcgactatttgaaatttatgtctaagaaaattaacgataccaaacttacttattttttcaatgctaatattgataatcataaaattgaaggatataaaagtaaaaattgattattcttttattaacgacaatttagaacttgaaagagagcgtcaaaaggttatatataaaccaatgaagaacttccttggttatgattatcatgatgacattgcattatccgatgcccttatattttgaaagcagtgattattctgattatatcacatgtatattatttgtattatttaacatgaatagactctgtaaattatttaagttgagccccctgaaaaatttgtacttttagttagtcacgacattttgcttgtcgtggtttttctattttatcgacatttctgtacattgacctatatcaacaagagtaacatagcttttctttggccttagtaaaataaaaggtttttaagaattatattcagcttgaaatttggttgaaaaaagctgtgaagaaaaaatatgaaggttattgtaaaagtgccgagcctacctaaaaagataaaatcactcattttaaagaatttgtattttgatttgtattttaaaaaataattgaagaagtgaaaaattgactatttttcaaaaataaaaacatagtaagaatttgatgtaacgtttttgtggattactaccaaaaagtaaaaactaaactttctttcaaatttaaaggaataaacaaggaaatgagttaattattataaatactaattggagaaataagttatacaagtgtaaataatggaaatcactgaaaagcaaaacaaagttaatataacattagtagctaaatattcagttttaataaagtttttgattgcagtttctgtttcaatctttttcaaagcacgtaaatagttttctgtttgtaaaggtttaacaccctttggtaaatgtgcaggatttggacataattcttcaataaattgttcgatttcaccacattttataccaattgcaagataatttggatcagaaacaggacatttatgatgaataatctttaaataataactaaaaatctccaatactccttcataagttcttgactttaatattaaatcacatgcagtaccttttctaattttaacgtttttcttgaaaacattcttattttgaaaaacttctgctaatgttgcaattgccattacttgtggaatagcacaaaaactaaatgctgatggatcatatgtcatagttaaataaacaagaacatctttaatatgtgccattgagtttaaaaccaaatcggttatacaatggagacctttctcttggttttcaggtttagtaaaatcagataatttactagcgtattttgaccagatttcttcaggccagaatgatctaccatcatcttgatcttctttataatctcttataatattagtcttttgtaaaaataaacccattgagtctgataattccatctttctaagtaatttaggatcactgaaacttgatgcgacacataatttagttaaaccatgaccaacaagacctgcaacataaaaacaatataaatcataatctttaacagttttaacaccatttaaattgaattcttcattattaatatagtcagccataccattacccatcttcttagtaatatcattaatgatatcttgatattcaggctttaatttatgaaattcttcaagaattaaattaaatttaacaagaacatctctatccttttcagtaggagagttaccatcgaaagtccaacctttaagtgctaatttttcatagaaacttcttaataaaggaattttaatctttggatcaatactcatatcatcttcaatagtgtctaaagctcttaaaataagatagaacaacatgatagcgttacgtaattctggatgtaattcattaataactgctgcaaatgatcttgatgttttgtttaataattcataacatgtcttttctgaatcagaagtaatcttcaatggataaagagatttcttgaagcattttctaataaattgatgattttgaaagttttatgttagtatttgaaaattccagtaaaattaatcaagtagaataaaataaaaaaaattaaaaatgatacctacaattgaataacagatttgaattcttctggatgaaaagctaattgaagaaatttactcatggttaaacaagtataccgtatcagttaatgatatacctattaagatgtaattacaaccaagatgatttatcgaatcatttatcaacaacaggtccttaggaaatttgttcacttttcacttttcaacatgcgaattataaaaaatctgtcgtatacagcgcttcgttccgccacgacacgttaagttgcgttaattctatggcttagagctctgttgaacagaagactattcttggtgagcagacaatatgaatgatcaggaacacgagtttgatgggaatgagtttagaattcatgaaggaatagttttaatcgtacatttatcacccacaatgtactttaagttaggggttatatttcaaactttcttgaacttgctcaaaaatctaatgaaaacctatgccacatacaggtttgggattatacttgggtaattgtactaaagagaacgatcaaaactcatcatctgaaattgcggaaggcatttatagagtgtttaggcttcaagatttaaacgaacgaatgctcaatgaaattaaacagatatttaactaatgtcaaatcaatggaatcattccttgaagggatacgacaagtgaatcagaaaaatggaagaaaatgtttccattgaaggattctaagtgtggaggaaagttttggacatgcattatattcccttttacatcaatctttagcagattttaataatattccaatgagaacagaagagtacacgagtaagaaagtatttttatttactgattgttttaccccttttaatgataatgaacaaattaagcaaagagtacagagtaaattgagagatttgaatgattcaaaggtaacagtttatccatttcctttgaggcaaaatacgcaacaatcttttgtaaagagtgaagtggagacaagttttagtagaagaagacttctgttgatttgagggaactaaggcaactatttgattttccaatggattttgaatctaagaaattcttaccaaatatttctgaagtagtgttagaatcactcgaagaaaaaataatgaagtatgcaacagtacgaagattattgtttcaatgtccattgatatttaaagatatcaaaatagccgtgaagggaatcaatcctttcacttcagttgaatggaagaaagtcaatctgtacaactataataataggttacaatatgcgattcgtaagagcgttcctcaatgtaataataaagatattaaaaagaatgaaatatgcaaagcttatcaaattgcagatcagtatatgccagtagataaacaaatccagaatgattgtatgaaatttggtgaaaaagagaagccaatattgcatgttattggtacaagaaaatttgaatattttaatccatcatatattataaacaaatcatcatttatgattgcagatgaagacaaagaacctaatgactctcaagagaaatttgcagctttgtataaatcattatacaaaaagaaaatgatggttttatgttggggtatgccaagaaaagtttcctatcctagattttattatttgattccaacaagtataatggatcctgaaccattatcacttgaaaggtatccacatttccttagcaatgattgaagttccatttggtaatgaaataagaaaagctccagaatttgtaaaccaattagattctacaaaggaaattaatgatagtccatttgttagattcacttattaaagcttctatcattgataaatttaaaacattttccaacccttcattgacatggaagtttaaagtgatggaagatcatcttttacaagtggaagtcccacagaatgaagaagagctaaatttacaagagaaacagttagagttagatgaaatgtttcaatctatggaagaaactaaaagaaaaattgagaaaagcaaagaacttacacaggttatagataaactatcaaataaatataatcaaatttcaaattataagtgaattgaagagaacagaaggaagatgttgatacgcctaatgttaaaaaggtgaaaaagcaagattcaaatagaggatattttaaatgatgttaaatgcgcattacattaccataattctaaattgaaaaattgcactaatgatatgcttagactatatatcaaaagtaaaggaggtatgattaagactggtaaaaataagggtgaaatgatctctaatattgtggagtatttagaaaaaaaccagttaatctgattatgtaaagagataatgctagcagttacgtaatttttaaatattaatttcaaccgtgtttacgtaaaaatattcatgttattttaatttagattcatggataaaacaaagttgtttgcaattaatcagcagcttgtacacatattaatcatagacaatgtggaataacagcaacgaagcatacctgcttaagttactatgttttcataaaccagtaggagaaaacgcagagaaattattaacaatcattgaaaataaacttaatgaaaagtttgagtctacgaatatcaaacttgatgatataaagagtaaaattaacgaatattatgatttgaaaggtttaagcgagtcgaatataacaaatacaatggatgaagttaatgtggaaaataaaaaacaaacaaaacatgttgtaatagatgaagataaaaacaaagtttttggagaattatcatctgagaaaaagatggacaatgaaaagtacgataaggagcaggaaattgttagtaacactgataatttggaacaaaaagctgagttagacaaggctggtgaagtacaacctgtcgcaggcaatacaaagaaactagctcaaatagaaacatcaaaaaatgaaccacaaccttcaaatattacagcacacgacgatttacccgaagaagaagtggctgaaaaaaacgacgaggtaattgttgaaagtaaagatgatcataagacagaaaaagaagtcaaagcgaaagaagacatgtccactcaacctgaaaaagatagaagtaaagaacctaatgaaaaagatgaaaataaaggtgaaggaagaagaagatgaaattgttgatgcagaaaccaaagataataaggatgcatatgtgaaagatgaagcagctggaggaaacgaagaagaggaagagcctgcgcatcttacaagatcacaagctagaaagttacacattgacatacaaaaagagaccgaacaaaatgaaaaaaagacattacactttgaagaaacaagacgtaaatcaatgaccagaaacaattccaccgatgaaggtacacaatataaagcggaagatgatatttcagataaagatgtttctattcatgtaataacggacgaagaattatcagattctacaccaagacgtagaggtagaagacgtttacaaatggatgatttaacaccacgccgaagtacgagattgaatagaaaatctatcgattctgactacagaagctaagaatgggaaagctgagacttcaagcgatgaagaaccaacagaatttattggaaggcgtacaaggagtagttcgaacacaagaaattctgaatccggtaatgatgatgatccattgagaccattaagtaagggccgtaaacgctcaaccacaaatgatatcgttgaaagtactacaaagcaaacaagaaggacaagatcattgagtaaacatgatgattctaaacctatagataccaaaaatacaaaggaagcggtggtatctaatgccgaagaagttgaatcacaagtggaagaaggattggataacgataatagtgatggtaatgaagaaggaaaggataaagaagttgaagaagagcaagacgaaacaaatgatgaagaaggtcaagaaagtgaacaagaagagtccagtgctccacgtagatcactgcgcaagagatctattgtagccaatgatgatacaattgttaagaaacagaaagctgaatcaccagatccatcaataacgagtctgggtacaccgtctgtaacaccaacacctaaacgtcgtggaaggaaacctaaaagtttctatgaaaatagtgaaactgaacaaaatacgccaactcgtcgttcaacaagacgttgaaatgtttattaaaatttatgctaatttctattaattaactattaaagcaaagatataaaaggaaagaaacccaaagtaaaagtataatgtacataaagttttaatgaaaattctataattttaaactattcgtattctgagtaagttggtatatccatgaatatacgagggaaatttgtattatgaagagggaattttgaaccatctccattaacacctaattctaaatctccattaaattgtttttcagtgacaatatttgtctcatcactattttcattatcactgtatcttttagatattctcaaaagcggtttaactgatttatctaaataattatttattaattcatcaccttctttatcaatattgcctgcaaaacctgaattaactaaacttctaataacccaaggattaattataccactgaaatgtaattcccaatttgtaccaacataattagtaattgtattttttagatcaattaaactttgaattgaagtagcatcagtaccaacaacttgtgaaaaatctaaatgaagaacacgtaattctggtaattttatatcattttcaactttatcgacatgtaattggtaatcctcactaccactatcactgttatgattattatcatgacgatgattctttgatgaaaaaattctatgtttaagaccggataaatattgcatatccattttccagtttttaatatctaaagtccaatctttttcatctaatgaatattcacaccataatctttctctaccactatcatgaggtctgaaagattttctaactttaccgatgatttgatcaatttgtgcagaacagttggtatatataaaactttcggccattctataaactaaaacaccagttggagggttttcaacattgatttgattattgatatatgaagtatgaacaaaacttggattaaaactttcatttggaagtgggacccatttatagacataattatcattattattagtattatttggtaaacttccaactgaatcaatttctaaagttttaatatttgaagtttcattaacagaatctaatttattacgattatatgagtcatattcagaatttgaatcttcaccttcattaattccattgttgattgatacattagattgtaaaattggatttgaaatttttgcaactttaactctacccatgaaagtaccattagtaatacacattctccataataattgagcagcagacgcacacattgcccaataaataccatcttcaatagttgcaaagacagttataaagacaccaacaatgaaaataatgaaatcaacaggtgaaaacatgtaaagcttagtagttaatttatatgaagctaataaacctgtaacacaatgaataataattgcacataaagttgcacttggaatataatagaaaccgtcagtaaaacaataagttgctaatagaaacacaagcaccagtgaaagcagctttaaaaggagttttaacaccacatttagcagataatgcagttcttgagaatgaaccagtgacaggatatgcaccaaagaaagtaccaatcatgttagtaaaaccaattgcaataaattcttgatctggattaactctataaccattaattctagcaaaagattttgaaattgaaatatgttctaaaaccaaaacaattgtacaaattggtaattctgaagctaatttagtagctaaaccaggttgaggtacaaatctaccgacatgatttaaacctgaaggaatagtaccaatgattgaataaggtgtcttttctttatgtgggtgatatcttaaaacaccaaatgagatacaagttgaaataacaataacgacagcagttctaatatttaaaatataattaagcattaatttagtttttggtttatgttcatacttcttaattaatctttcaagaacaaattgccataaataaagaatgaataaatcaactaaaccaaaagcagcatcaaccttagtatcaggtaaatgttttaaaaaggcaattaaagtttgataagttgtagaatgtttaccagcttttttattgaaacccattaaaccagccaattgaccacaaactatattaaaagcagaaccagttgtaaaagccataatagcaggtaaagaaatgaattccacaataaaacctaatcttaaaagacctaaacctaaaactataccaccacaaattagagctaaagtagttgcaatttcatttggggaatattcatcaccatatttattttgaaatctaacaataattttaccaacttcagtacttaaaacagcaactggaccaatacaaatttctcttgaagttgcaaagaagaaataaaataaagcaccaataaaagcagaataaagaccaaattctggagataaattagctaattttgcatatgacattgattgagggactaaaacaattgcaacagttataccagtaattaaatctgataaaacccattgccaatgagaaggataatgagggaaccattcaataacagggaaaagatcacgtaaataagaaattgatctttgttttggatttttgaaaacatttttaacataatctgatgaagatacaactttttcatcatcataagcaggtattttattgtaattttgttgatctgtcatattgaataataatagtaaatttttgaaatttaattttttttaattactattatagtctgtgataaatctaatatactttactctaaaaggatatataagtgaaagggtattaaaagtagaagtaaagtttaagtagatcagagggggtgtagtcacaaagaataaaagtttaaagtagaagagatgagatgagatgagatgatcagcaatatttaaataatatcaaaggaaagatgtgggttaaagaaatatgggaatacatggcttaaatataaagctgtggatatatacctgaagatattaattattaatcatcatcaagcaaactcaatgtacaataactgatgatatttttaaagggacatgaatcatgtcaatcaggataacaagtagttaccctattaggaaattattctgagattcaacaaatttttcaaaaaaatttcattgtggcgcttgtattaacttagttatttaattaatactgtggcttagataaatactgtggtgtttcccattttttttgcaaatgcgcatgtcacgtgaagcaatttttaatattattatttaaaattacgtaatacacaaacatcaattcgaatctttaaacacgcaaataaaatgaaatgaaaataatttaaagatttaaaaatagaaaagaaaacgcgttgtattaattgtttcataacggttttataataaaaaagaaagaaaattacctaagaaactgaaaaattataatatttttatttacgtttcaacttttgatataattgagatggatgaatcaaggctgaaaatagaatcaaattaataattatatattgatcttttttttaatttatctgtatataccttatactctctattatatactcatcttttcttgattcagccttctaatagggtttagaaaatgcatctatcatgaactctacaacccaattatcccttgaaaaaccatcaatgaaaactaaaccttcaattatatttgaagatcctcaacaaattacttttgataatataaagggtgaacataattatagagaatgctcattcctaaatattttaagttattttttcttaatatttggtatagttttacaattattattcttaggatcagatgttttcactttaattcaaatttatgctctgaaaaattggaatagttctcatacaattacttatatacccatattagcatataaaattgtctttacagtctgtattgggatttcattcctttattttatattcttttggattcttggagcaattattcaacatagaaataaaattgtttcatcttatttacattcaggtgcaaggcatatagattctataaaaagttttgaaagattttgtatttatgaaaaaattcaaagtaaaaatttacgtgaatggttatgtttatcaatttatacattttatcattatgatttaattaattggatattggcagattctccaagacaaatattaaatggtgcaacaattgcctttgttgtctcaaatcaattcacaagtggtaatttaaaagctgtcatttcagaaattgctcaaaatgataaaaaggaagctgttcttttatcatttatgtttttctcttttgttgtttggttggctttcacctgtaaaaatattatcattattttatcttcaatttgtattatttcaaattcaaagaggaaatataataaaaagtttaataattattgttttgatatagttgctcaacgtgtatctcaattatatgaaacaaaggctcaattagttgaaaaggaacaatcaaagagaagaaaagttccttcatttttaaagaatcctgacttagataaagaatttaacgagttagatgaatttaattatgatgatataccaatgaatgatacattcaataattcattgaataattcaactactaatccatttgaaaaatcttataactataatatgaatgaatcaatagtatcattagataaatttgatcatgtaaagatagaactgaccgatttaccaatgtcacattcaagagttaatttagttaataaatcaattccaaatattcgtaacaattcagattttgatcattctaataataactataacaacacagaaacaaactacaattcttcttataatgtagatgaaaatatagtgaatccatttatgaatgaacaattggtagataattcaaatagagatagttacacttatattccatctaaagtatatgatgaagcttatcatcaaatgaaagatccaatgttatcctctgatagatatgaaaatagaccccctatagacgtttatgaaaataaaccaatgcaatgaaaaatataatgattcagaagatattgaagattcatttgatagtaaaactaatcttcaagaatcaaatcaactttactggatcaagaggtttaacttttaaacgtgatattatttaacaagggggaaactaacataacttactctttttttactgctaatttacgacctgaattttttttctaagcattaatacattatccatataatatatatatatatatatacacacacaatatccaccattattgtaacctaaatggttttatcttaaaatgtaatgaaattaaggaataaactaaagttttcaaatcttgtgcaagataatagaaaattttcaaactttccttttcttcttcattacgaattgatgataatgatacgatagtctttgttttaaataattttttattcttaccataccttaatctcaatttcttgttttgattcccttgtaacttttggccaatttctatcactttctaataaaatttgactttttcgtattatatcaataaattcttgtaatactaatattgaaactttaacttctttcttaattaaatcttcatttctataatttgtttgatttgcatatcttaaaattgcaaaatttttcccttggttcatgtcgtatatcaaattcaagaaattcatgtccgagttcaatatctctaaatccacctgaataaaatctaaagtaaaattctttatttctctctatcggatcaatatcaaatgaattactcattataagtgattatatatcttgatactatgaccagtaccttaacaaaccctctaatccaaaaggtttctaacattgattatattcatgtagtagtaagtaacagacaaattccaacagcccaacgaccaagcgacgcaaaatagaaataattgtgaaattttgaaattttccaatatttcaacattcgatatcatgaattatatgagtaataattaataaattgatctttcagatacagaatatattattatattatcttgcaaagaacacttcttttaaattaatcaatcaatcaattctctctacagataaatatgtctgaacttacaccagatcaacaattcgaacttataactagaaacttacaagaagttcttaatccacaaattattaaaaatgttcttgaagttgaaaagagaccattaaaagtttattggggtactgcaccaacaggtaaaccacattgtggttattttgttccaatgattaaattagcacatttattaaaagcaggtgttgaagttactgttttagttgctgatttacatgctttcttagataatatgaaagctccattagaagttgttcaacatagagctaaatattatgaatttcttaattaaatcaattttaacttcaattaatgttccagtcgaaagattaaagtttgttcttggttcatcttatcaacttacaccagaatataccttagatttatttaaattatcaaattctgtttcacaaaatgatgcaaagagagcaggtgcagatgttgttaaacaagttgcaaatcctttactttcaggtttaatttatcctttaatgcaagttttagatgaagaatatttaaaagttgatgttcaattaggtggtgttgatcaaagaaagattttcgttttagcagaagaaaatattcaatctttaggttataaaaagagagctcatttaatgaatcgtatggttccaggtttaatgcaaggtggtaaaatgtccgcttctgatccaaattctaaaattcgatttattagaagaagccaaaaactgttaagaagaagattaatcaagctttctgtgcacctggtaatatcgaagataatggtttattagcattcgttgaaaatgttttaggtccaattcatgaattaaaatatggtgatggtacctttgaattctttattgatagaccagataaatatggtggtccaataacttttaaaacatatcaagaacttgaagattctttcaggaaggaagaattatcaccagttgatttaaaatcaggtgttgcagatgctatcaatgttttattagctccaattattgaagaatataagaataataaagatttccaagattctgaaacagcaggttatcctgctccagttgctgaaaagaagaaagtaaagaaagttaaggatagaggttcaagatatcctggtgcaaaggaagaatcaccagctccagcttctgctccagttgaagctgttgcagaaaaacttgaagaaactaaattataagagtattttcttttcttttcttttcttctctttacgtttaccttttaattttttatacagtatacataatagattttaacagtgatctcagcattactccttgtaattataatcgtaatcattatatatagtcataaatcacacaaagctgcacatgcatagtggagaagtcttaataaagtttttttttgatacaattaacggcgcagaatctcaaattaaaaatttattggactctacctactatttcacggttccataatatatctcggatccaccttcaggttcatttcatcaattgaactgcaattttaagtcatatctactagttagtaaccaaaataaaatataacgttataactcatttgatataattacatgtcaaacagtaaaaaccatcaaaaagcaccagatctaagctctggtgaagtaaatatttcaaatacaacaacatttcaggaacaaccaccgaaaaagagaagtaatttagcatgtacaacatgtagaaatagacatattaaatgtgatggtgccgggaaacaatgttcacgttgtaaacagtttaatttagtttgtgaatatacagaagctgaaaagaaagtggttatcagtattaaatatttggatagattacaacaacaaatttcaaaacttaaaactgaaaatgctaatcttagatcattgaaaaaatcagctagtttgagcaacacaaatattgaatcacaatcagactttaataatgataccaagagtcaaaattttgataatagtgatgccaaaaacaagcatgaaactgctgatgaatcaacaaaattgaataatgataaaaaatcacaagaattcatatctccattccttgaaaagaatggtcgcttgattcactccagaactggggaacgattatacattggatcatcatcaatgactcttttcggtttagaaattaataaattggttaaaccaatacttgcaagtatgaataatgaatcaaataaaggtcaaacagactctcataataatatttatgataattcattaaataatgaaactatattggagaaagaaggaaatgcttatagaattatgttaggtaaaaccacttcacgaccgggaattaatgttaattttacattaccaagttatagttatgcaatgcttttagttgattcattcatttcttataatgatggatgtttctactttttcaatgaaggtttggtaaaggaaaatttaagaagaatttataatgatgataccaataatggattcaaattagattatggtattgatagtattaataacgcaacagagaaagatccaacattagaaactatttggttttgtaaactacttttgatttttgcaataggtgaaatgtatttaggaactgcaaactatttgaatggttataaaataaacgataataataaaagaaagaaacaaaaacttaataataaacaatctaacactcagggatcagcaagtaatgaatcatcacctaatgaaccagtatcagcagaaccatctaacaataagaaacataagaaacataaaaatacaaaacttccaggatcagggttttttaatcaagcaagtgatttatttaccggtttattctcaagtgggtcaattgataattgtataagggaaggtggaattgaagttttattattatatgcattttatttacaagttgcagattgtacatctgcatcatacttttattttggaattgccttaagagcgtcattgttattaggattgcatgttgatataggaaaggatacgataaataaatatgaacttgaacatagaagaagattatggtggacagtttatatgtatgaaagaatgttagcttcaaaggctggattacctttgtctttaacagatgaagacatactaactgaattaccaggagattttgatatgtcaaatccaccacccggttgtgaaaattatatctatccagaagctgaatttatcagtaattgtgtcaaaataactcaaattaatgcaaatattctacggaatctttatacacgtcaaccatcatctaacattttaccagttgttcatgaattagtagtttctttacttacatggaagaaaggactaccagatgaaattaattgtgattattctgcacctaaacttgatatttcgagacttgtggtcaatatgatgacagagtattttcaaggtgttaatttagcagttagaccattattatttcattttgtctctacaaacttaaaatcatctaatccaaaagagggtaagtttttagatttatctacttattcaccagttattctggcactactaaacgcatcatttcaagcatcaattaatacaattagatctttatgggcattagttcctgaaaatatggttgcaatgtttggatatatggatagagaatatttattcaatgctactgcaacacttgtattatttgatgcaacatttggtgtctatgaggcaacaaaggaacatttggatcatgcattaacattatttactaaaatgaggaatttaggtaatcatccagcaactttaagaagagaacaaatacttaaacttatgtcaattttaaattttaatagtgcaatgagtgacttaattgaaaagcatacagataatttatatgctccattgtcatttgctaatattgatgattcatatggccataaaatgagtgttaataattcatcatctagtacttcacaacccaatactaatatgaattataattcaagaaatatgatgcatcatccttcacttgatgaaaatattagccataatagtactaatactagttttggaaactcaccaaatgatggcaaaccaacatttgattcattaaaacatttaagtaatagtgctgaattcacagttaaacagttccgtgatttccaagaacaacaacaaagagagaagaatcaatataataatttaaatacgaatcataataataacaataatataccaggaaataatccaactacagtaattcataatgatttttcatcatttattgcaaataatactaataatcatggttttgaatcaaaccaacaatcaaatgttaaagaagttgatagtactcctaactttagtaccattttctccaagtttatcattaatgtttaatcatgttgatgatatacctgattttgatcaattatcttcaactacaaaagatttggaattatggaatgatataacacatcaagctgcctggttacaaaatgatattggaagtggaatggattttggagaatttaaatagatttaaacgtcaataaaatctttaaaaaacaagaaaattaattacactaaatatatcctatataaaatataaattatataattactaaagcaaagtgaagtaaaaacagagtagactaaataatgtctaatgtaatatatagctcaggcaattaacttaaatagagaaataaaacaaacacaaataaatttccaaaaaaaagttaacaaattgatttgatcaacttattaaaaaaaaattgaaaagatgaaaaataaagaaaagaacattaaaaattttgacaaagcaataaaataaataaattgtctttttaaccccaattaaaaaaatattttaatattgaatgtcacaaatacctaaagaaatgaatcagtcgtaaaattaattttcaactggtgctgcagtttcttcagctggaagcttcagttggttcttcattcttataagattggtaaacattaattgcttcatcaagttgttcattgaagacattttcatcttctaagatagaaacaacttgttcattttccattgataaaagcataccagtgattttaccaataacatttggatcttcaactttatgagattcagaaatcttttggtaaatttggttacctaagtaattcttttgttgttcaactggaatttgggaaagaatttgagataatgattgttcatctttattgaattttcttggttgttgttgcatttgatttggtctgttttggtaaaatctttgttgttgcattctaccttgttgataatcgttataaactggttgaacataaactggaactggttgaccattaacaactctgaaatttggcatttgttgatctggtcttgcaccaccttgaggaatcatcatagggttttgtgcatttgggaatggaccacctctaacaccattagtcattggtggcatgaaattttgaccatagaacattggtgcaacaaattgacccataccattttgaacagcagcttgttgtaatctcatttggtttcttgcttgcatttgttgagataattgatttcttctaatttctcttctttgagctaaagcaacatataatggcttagattcaacgattctttggtgcatttcagagatagctttagttgcttcttctggagttgagaaacaaacaaaaccgaaacccttagatttaccagattcatccttcataacaatgacggaagtgatgttaccatatggagcaaattcttcctttaatttttcatcatcaattgaatcatctaagtttttaacgaataagttaacaccttgatatttgttaattttttcttgtttaacagcatcatgttgttgctttaattgttcaactctttctctcttcttttgagctctaccaacatataaaattttatcaccatgttcagtattgtttaaaccttcaactgctttaacagcatcttcatggttttcatagttaatgaaagcaaaacctttagaattgttattttcatcagtagctaagtagattgaagtaattttaccgaatgggttgaataatttttctaaatcttcaacagtccattcagtgttaaagtttttagcatagatgttagtgtagttttcaactaattcttgccattttgattctctatctttctttaagatatgtggaccaacgtaaacttctaagtcatttaataacataccattgacattttcaattgcatctttagcagattcagcattatcataatgaatgaaaccgaaacctttagatctaccattaacatcagtagcaactttacaagataaaatgttaccgaaggatgagaaagtatcatgtaaagttttgttatcaatatctgggtgtaagtttttgataaagatattacctgaaccattctttcttgaagctggatctctttgagaccacataattctacatggtttacccttaatttcagcatagtttaattgttctaaagctttttcaccatcagcatgagattgatagttaacataagcgtaacctaaagattgtttagtaagagcatctctacaaactctaattgaagaaactggaccaattgcagcaaataattcatataattctgattcagagacagatgggtcaagttcaccaacatataatgaagatggggtttcattttgagattctggagctggggattcttcagtagtagtgactggggttgattcagtattttcagtaactgacaatttttcaacattgtcagtgatttggttaatatcagcagaagacatttttttaattgaagatttcttttttttttgataaatataaatttgtgtgttgttttgttaatatagattagagaagtgtaattaaaacttaaccaataataagtgaatacttgattttttgttaattttttttaattttttttagttttttttgatttattttttttagaaataaaggattttttctagatatgtgtggtaatgagtccaactataaattgaaaaaagctaactgggcgattaatcgacgatgaaaactaaaaatatgttctgccaaaagagataaatcaaaagagaagccaaagaaaatcaagcaaaaaaccaggaaacgtcaagggggaaaactccaaaggcaaaggaaaagaaaacgttaaacagtgggaaggcaaatggaatcactgagaatgttggaaaatgggaaaaaaagtgaaaaatttttcaattttcgttaacttgacagaaattttaaatttttcaaattttagtatgtgacgacgcacactttcctatttgggttaataaatttatccctcctttatctaagtctaggagttatataggttaaaggtacattatttactatcgattatgtataatataatataaaatatatataaaatatcagtttaaaaatacagtaagacacaaagatcacttagtcatttatttagttaattcatttagtattcttcgccttctttaaatacactcttttaatgtcttcggcatttacccccttctttggccatgatttacatgcttcaatccataactctttatttaatcctttcttatcacttgaaacattttcaatacatcgtccaatattaagtaatgatgtcttaagtttatttgcccaatcagccttttccatacctttacccttactttcccatatcattaaatcttcaacaactggttttaataatggatgatatgtaccttgtctcttaggccctgtaggtaatgacgcaattgatacataatttgttccattacttccattggaatttccaattgataatccacttccaactgttgtagcacttgatggtaatgatgatccagataattctccattttctgatacatcaggagttgaagatttcttatttatacgtttcttaaccttctttattggtaatgatgtattatctttctctgtaatcgtaccattaactatatccttcaagaaatttaataaataatcacatcttctcactaaatgaacagctccaggtatacgtttacttggtttctccttatctgcctttgccccattagtacttcctgttgtactatctaaaaataatttattttgtaaatttaaaattggatcatcacgtatttgaatccatgaaccatatccaaatttataaataccaataagtaaacttttatcatcatcacttttccaatcacactgtccatccatatactggttttggttcaatcttaaattgaaatttcattatatcgtcactaggaataactttccttaaaatatcctaattcaacctggtcttgataatatagtctctgcatttaagtttctacaacctccaaaatcaaataaaatagccttcttttccctcttctttgcatttaatgcctgtaacttaggtgttggatatggtgatctatctgcattcggtggtaatgatgcattttcaatcttttctctattagcttcctcttctaatttcttaatttcattatttttattgaattctgcatcttcaactaattccttagacttggcaactaattcatcataacatttcttaataatagcaggatttttattaggtaatgtaccatctgaaattaattcatcaattctaccttcaatatcaccaaatttaagaattgccctatagacactcctaacttgtgcttctgttaatttattcatatctaatttacgaccacgtttacttctacgtgcactatcatcatcatcctcatcatcatcgtcatcatcgtcatcatcatcattacttcctgatttgattgcagctttacgttttcttgttgacatttcaatttgttctttaaggaattgttcttcttttctcttttcatcttcttccttaatttttttcaattcctcttcaggaataatatcatcccagtccacatctgctttataatcagtaacttcaaattgttttaaaaattcttcactacctaaattagattcacctaattctggagttgtaatatgatcctcagcatgatttaatgcatcctctaaatcaaagttttctaatttcttttgattatccttattcttaaacatagcacttgcaccgaattttaaaatttcacttaattcaccagttgatggatcagccttactattagttacctttttatcagttatacctaatgatataattgcatattctaaaatcatctttcttctagctctttctaaaacttgttcctcaattgtatccttagagacaaatctataaatcataacatgattcttttggccaattctatgagctcttgccattgcttgtaaatcagcttgaggattccaatctgaatcaaaaataataacagtatcatgcagtcattaaattaatacctaaaccaccagctcttgttgataataagaaaacaaaatcttttgattcaggtgcattgaaatgatcaattgcaattcttcttttatgtgaattgaattgtaccatctaatctttggaaacttaaacctttaagttgtaaataatcaccaataatatctaaaactctgaccatctgagagaaaattaaaactctatgaccatctctctttaacttacttaataattgatccaataaaaccattttacctgatgacataattaaacctcttaaaatattttctcttgttgaaccaaaatttgataaaactttttcttcaacaccatcaaataaatatggatgatttgatgcttttttcaattctgcaacaatatttaaaagtgaaaacttgtgaacctttgatacctttattaagagcagaataatttttagttaaaatatttttataataatcagtttgaatatctgataattcaactcttaaaattctttcagttttaccaggtaatgaagtttcaacatcttttttcaatcttcttaaaatatatggtttaattttcaattgtaaatctttaatataggatttcagcttcatcatttggtgtatcaaaatcaatttcttgatcaatgttaaatttaccaggcatgaggaaattacaaagtgcagctaactcttttaaattattttgtaatggagtaccagtaattaataatctatttgcaattttaaattcaaataatgcttcataaagtgaactttcagcatttttcaatctatgagcttcatcaactgctaaatattgccatttgaaactacctaattcacttctatcctttaaaatatattcataagttgttaataaaatattaaattttggttttttcttattaccaccaacataaaattcataatctctaatagtttttcttgcctttgtattacccatataatagataacattaacatctggagcccatttttcaaaagtttcttgccaagcgggcgttgttgataatggaacaacaactaaatgatggaccattttgtcttcttgcataaattaaccaagaaaggaatgaaacagtttgaacagttttacctaaacccatttcatcagctaaaataccattttcatctcttgaccaaaggaaagccatccagtttaaacctgttaattggaaatctctcaattcaccattcttaataaatgagggttgatcagttaatttttcaaattttggtctatttgaaccatatgaagcagaatttgcaggtaaaattttagaattttgtctattttgataattttgaacttgctttggagataatgaagcaatttcagaacctaattcccaagtacattcatcataatttaatcttttccatttaacaaaatattttaaagcagattcaccattatccaaagtacttctctcagaatcaataattctatcaacttttttatattcattaaaattttcttgcctattttcagcttcaatatctaattgttcaatatcttctctagtaacaaatggatcatttctatattcacgatctaagataatatattgattaatataattatcaagttttttaaaaccttttaaacctttttcctttaatgaatcataagtttcccaactattatgtatatgagcaacatcaacccatttgattaaatattcgaaatctgattttggatcaccatgttcaaaaatttctttaattttagttctcttttcagctttttcttttttaattaattcttttgaatcatcagtttcttcaattttaatagcatcagaaatttcttcatcatcttcatcagatgataaatcatcaccaataactctatgattaacaattaaatcaatagttgcagtaggttcaggagtttcatcataatattgataattattattagattgttgataataatcatcactttcatcatcaccatcatcatcataatcatttccattatcatcatcagattcaagtaaatcatcatcattaccatcatcaacattataattaatacttttactattattacgagaagagaatctaattgcttgagaattcatatcaacactctttgcagatttttgtttcttctttgatgacttcttaataatttttcttttattctttgaagattttttagcaccatattcgacatcatcatcatcttcatcatcatcatcactaacatcttgatcataattattgatttcattttcatactgatcatcaccatcagaatcaaaattttgtctctttcttctctttcttgtattgatttgatcatcatcatcatcatcatcatcttcgtcatcgtaaccattgttattattatcattatgatcatcattattatcatctgaaaaattataagattcagtttgagttctagcacgaccagaacgtcttaaaccataaagttcaggattatcttcaatttcgtcgtgtatgggcatgattacaacaacggatgaagattaaatgttcttgtttaaagataaatctaatacaaatatataagataaacctattcaaaatgaatgtaatggaaagagaaaaaaaacatgcaaaagtaaaaaatgtggaaattggtggagacctgaacagcaagcgccaaaaaaagaaagcgattttattgacgaattaagtgttattaaagtgagttataataggtttttaaaatgatagtagtagtattgaattagatgtagagtgatgttgttagaagattgtacagaaatatacaggattgaaataatgaaataaggaatggaatgcaaaatagcaaataagtaatagaaattaaattgaacatatctatatctattacattattatatccgtactagaatattccaactggaataaacataatacgaaaaaaaatgtaatataatgaaaataatagcagtgacacgtaaagacacacatacatgacacgaaatagcagacggcaacaacattgcaatgatagagagtaatagtgtattaaatgaatcaaccataaagacctccatctgtttagtaatggacataaatagtttaatgacttaaaatcatcatttgatcaaacgggtaatttaaacccagacacgtaaaaaaaaactagacgccaaaatataattaggatgtaaatagatcaaacatcagtgaagtgataatgaagcatagtcaaacaggacaaacaatgataagaatatgattattcacagtgagtgtgatagcagagtgaaccataagagataacataagataagataagataagataatataataaatacccataagtacactaactgtaccatgtagcaaaacgctctctccatagtaaagaaactggaaaaaaataaaaaaaaaagaggaaatacctctccttttatacttttcagagataaacagaaaataaaaaaattagttagttaattacccgctcttttacaagatgtcccctttttagattataatggcattaataacagttgctacttatacttatctcttcttatacctatctctttattcatttatatctcactataacactattgatatgagtaataataacatcactaacaggctcacaccgcatattaatgatggtgatggcgataatgatggtgatttatctcatattcaaagattatcctcaagatctgtccatgtttcggagttactacccgtttactccgaaattactataccaaataataataataataataataataataataataataataataataacactgatgatgatgatgatgcttttgatgatatgtttgaaatgtctaatagagctactcgcagatcttctttaagacatttacttgcttcatctcatgatagtaatgataatgatgaaaatgatggtaataatattaataataatactaataatactaataatacccataccaacaatcaacctagaagtagcttatttattcgtgatccagtcgtactagaatataatcatcccagagataatacatttgatgatattcaatctcaatctcaaatgaatgaagcttgtaatcattattatcaatcattattaaaatcaactaatgatgaaatggctgctataagtcaaattaataaaaatagtagaaataatgatattgatgataaatctatttttgcaaatcatatagatcatgaaatttattataatattccagcaaaaatgcaaaaatttggtttaactacattacttgatgaattgttaattacaagaaatttcactcaaaaggaagatattgataattatttaactagttcttttgatatgaatcattcattatttgatatcaaacgtaaacgtacttataatcaattttgtgtcgatgaaatgaaatcagaattaactgatacttttttccaaaataataatacagttaaattaaataaatcttcatttttacaaaatggtgcatcttatttcttacctcaatcaataaatggtttgaaacctaatataaaatttacaaatgttgattatgaaaaattaaatgtaagtggaatgattaatttcagtgacgttcaactttccttctctggtgaaattgtcgattttcaaaataatgatttaagatataaagattcatcagatattttaattgaaggtaatgctattagtaatttaacaaggaaattatttagtttcaagtggtaagtttggtaaatatttcgataaaactaggaaaaaatgttatactaaaaacaattggaaaccttttagtatgaatagaatgggttatatcatgagtaataaatcaaaggcaaaagttttaagagatatcaaaagtattccaatcataccaattcaaaatacaaattttcccaatggttctgttttccataaaattaatcatttatccgattctaaatttgaatcttataaaatattatctaaatggtttgatttacctcctttaaatcaatttattaataccccatcccctccaacacctcctcatgctaataggaaatgtgttaataatcctgaaaatttattaatttgcaaaaagtgtgttgatttgatattatctaaatttattttcttaaagttggaaattgatattcatcatctttttgaggagaattactgatacgattaataataaaacaaaagcaaaatcatttaaagcaaaccaaaatcaaaagtaaattgaaaaagggtagaaaaatttattctgattcaatttataaacgtcgaagaagatttaattattatgcaaataaattagttatcaaaccaagtattggtacaagaagaaactatgaaagacatactcttggtgcaacattaccatcatcatcatcatcttcttcagaaaattccactccagaagttacagtatttcctaatcttttaacacaaaccaatacaagaacaagaacacactcaaattctaatcctacacaaatcaatgatgatagcaacaataatattcttaacccgaaatccagaaactcatcaattaatagctttattgatgaaactgatttaatagctaataatgaagaagaacaagaaacaagaatccaattttttgataatgacctttattgtgatagcaatggtattagtgatcttaattcatttctggatggtgaatcaagtgaagaagaatcacaaggtggaattcccttcttgagatcagaaggttatgttggtatgattgatggtaatgaagattattatgatgatgatattgaacttgatggttttacagctttaagttctgctatgaacccattcgaattatcagaaaatgaaaatgatgataacaatgataataatcaatagtaatgattatgatgaagatggtgatgatgatatagatcttagagaaggaatggtcgaaggcggagaagtgggtacttcaatgaatgatgttggagaggatgacgaagaagaggaggaagatgataataatgatgacgacgatgatgatgatgtgatgatgatgacgatgatgattttgagggtaatggtgataatggtacttttcttgaatatcaacatcatatctggccattatcaacagaaagatattctgatccacatccaattttggatccaataagttcatcagatggtgatgaatatcttgaatttcaaaatccattcggtgctatcttttcaacagaaagatctagacgtgtatctagactgttattaagtttgaatatttcaagaagtcaccagaaaagattagtttcaagtttcaaactttatagaccagcaactagagaaacgagtaaaactgaaatgaaaagaatgaaattagttttattaacatgtattgataggaaaactggtgaattatttttaactccaggtaatatggatattaatttatggagtaaagaacaaaataatggcgaattatttactgatattcaaaattatgggaaagtatttaatcttttcatgcataagagaaatccaactactaaacataaagttccatatactgaaaagatcaaaaaatggattaagaaaaatagatttaaagaatctgaagaaattaaacaattattagttttacaaatgttaataaacccatcaattattaatggttatagtaaaagaaaggaagaatatcaaaaattttggaagaaacattcaactaaatctagttataataaaaaaggtaatgaaaaatccaaagaaaaaggtaaaaattggaaaagtaagaataaaagaggtaaaaataatagaaatttagataatgaaattgatcgtaattcattatttaaggaatcggaggatagctttatagaagaaaatgaaacaattgatgttgataaagataaggtgttaatgtttaaatttggaaatgataccaatccacatatgtattcatttaaatacgcttaaattatttaaataataaataacatcaataataaaatgaaatgaaatgatatattgtattgtaatgtagttttaatagtttataccatgtatttacaagaaattgttaattaaaggaactttaccacataccaccatttctattatctttccttctttgttccatccattctttcttacattctctataagcttgaaaatattcactacaaatttctttataatcttcttcattattttccatacatctaattgccattttagaagattcagcacatggatcataatatcttgaaggttctttaataataaatctatccttatgcaatcgctgagttggtctatctggataaaatctaacatcttcaattgttttattatcatcagcctttttaataaattcctttgtcactgcaggttcagttgtagattcgatttttcttaatgttttattatctaaatattccatgtcatctttagttaatgtaggtgccaatcctttagaatgttgttcctgtgctggctgtttatcagagctcatcaaataagtgggtatagtcaatgaaacactaatcttaagagaaatgaatgataactaatcaacagtcttaacatcgatccattgaagtgacagacggagacatcaaaatctcgattacggctgtgccatagttacccttttgagaagtttttgaaatttttttattttccatttttcattacttttatcactgacttttcttttgattttatcttgaatttattttatgtgtactataaatatactacaagggaataaaatatgactgagttaggagatatatgtaaacgttgtaagaaagaggtcacaactgtcacttcaagaaaaggatacattctgtgaaaactgttttattcgttttattagaggtaagcaaaggaaacaattgcaagatgataaatttaaggttaaattcaaagtcaaacctgatcacactaaacttagagtattacttgattttgaaaataatgaggaatcatacgttttactggatagtgtgatatcaatgttaatggaacagtccaatcaaggtccaaaaggagtattaggatttgaattaattgtttctgtaattaatgattctccagattttcaattcgatcttgctaaactaaaaaatttttatgggattgaggaattacaaaaattaggcgtatcctttatagaaattgattgtaattcatttgttactgataataaatttgaacaactttcattagatattaagaaatttcaaactttaaaaataaaagatgatatagaagatacaaatattaagagttattcagaattattacatcaagctaaggataagacaacaagagaagatctttctattattgttcatgaggatataactattaaaatagcggttgataataaatgtagcataattcttaaaagtgattcaatgactagaatggccgttactattctttcagatactattcgtggacgtggagcagaaattccaagacattgtgataataaatatattggaacttttgagatgatgcatccattatctgatattttaaattctgaaattaaaacatacatcaaaatactaggtattgataagttatcaccaagtttaagtgtggaaaatgttaattcaaacttatcaacgaagagtaagaccgttaatgatatgattagtgaatatttccaaacattagaaattgaatatccagaaactgtttcaaccgtagtgaaaattggtggtaaattatcaaataatgatgaaaacattgcaaatcttcatagatgtgaaatttgtaaattcccaatttaccatgatccaaaacaatggcttgaacaaataacagttttagatcatgtaccaccacaaaatgaagaagaaaaggccaattatcaaagatatctagaatcaattaataacgataaagaaattgaaatcatctaatcaaactgttgatgatacgagtgttaatttatgttacggatgtatggttacattaggtgtttctgaggtaaataatcttcaatggccccaaagacccactagagaagagatactatccgaatacatcctagatgatgacgaataagtgtttatataattgttttgtgtatataaaaaggaagaatcagtgtacattttaataagaataacggggctcaaccattttgtaaagcgaaattggcaaaatgattgttgaaaaatttacaacctgttctatatgggtgtttataattaatgtttttctttcttttgtagcaaccattagagatcttattatgagcagtgaaactgataacagtgttgaaacctcatttttgaaattacaagaaattgaatcagatattaaaaaggctgaagaaaaagttgaacaatttaagaatgaacttttcaaaccaatttatgaaaatcgtagaatttatttaaatcaaatacctaaattttggtatattgtattagcacaacatgaagaatttcaggaatatatcagtgtagaggatatgaaatatattgaattaatctctgatatatacgttgaatttaaaaacagtattgatgatgatggattgattcctaaaaaggcattctccattactatgtcatttaaaaatactgaagaaaataaagataataaaattaaagaacaacaagccaccaaggaatttgaatgggaattagatccttccacaggtatgagaaaattggtttctgaaaaagttgcatttgaatggccaataaatttacaaaaaattgatcctgaaacaattaaatccaatgtaaagaaagagaatagaaaattaacttctgaagagaagaagttttacagacaaggtatgagatcattcttttcattttggtcatggacgggtcgtaaagaaggtaaagaatatcgtaatggcgaagaacttgcaagtttaatttcagaagatattttccccggtgcattggattattacgttattgcacaaaataatgggggtgaagatggtgattcagatgatgatgcaataagtggcgaagagttagatttaagtgatcccgaagaggaagtaagtagtttcaaaaagacaaaagatatagttcaattagaaaagcggaagtttttttctgtataaaatatacactctaccaaatgtaatgtaattagataaataaataaatgaataaaaagaatgtagaataataggacagtttggtatatatagtaattactatttttattcgaaatcaattgttgaaaaataagatcttgtttcccattcacatgttgaatcaattttatcaattgcttttagagcatctaatattccatcataataaggtcttatggtttgttgtataccaaattcttcaccatctaaaatgaacagtaattcctctataccagcatctttcaaacgttgaactaactgtgtactatgaaataatctagtaaaaaaaacatttacacctcttctttgataattatcaacaatttcaaataataattgtgcagcagatgaatctaaacttgtcattccgtgtaaatcgaaaacaacatgtctcaaatctttatcttcatgaggtgtaccacctggatgactatgagctgatccatataattcaatacgttttaaacgacctttcatatcatttgcattgaaaaatgttaatggctcaggtatcttaacaataatacacccttctctgtcctctaaattaggaaatatatccatatttgatacatttgaaatatttttatctctattcattgaggtagtaagaggagaaggtggagcttaacagattattactattattagtggtactacctttatctatatttttattttcaataatcgtttgacgtctaaattctttataaccagagacaataattttttttgggaacttaaagagatttgtgtcagaacagtcatcatgaagtcaggattgacaaaagtatcagtacctttgactctagttaaaatttgaattcttgattgagttgaatgttttaaaactctcattaatgaataaaaacaccccatagagacaccaacttcaattgaataatataatgaagcagataatgtaactataaatgtgaaaatttcattccaaccttttgttctgatatgaaatttaagttcttttggagtttcttcaatcattttataaccaacatgagctataactgcatttaaaacacataatggtaaataataaatataatcaagacattttaaagtaataagtaatgttgtaatacccataacgaatcctgaaacaggagttttaccaccaatacttcgaatttaatttagatctagcgtaaccaccaaatgatggaagtgctccaaaaaactgagacagttgtacctacagcacctaatgatacctaattctctatttgaagatacaggagtttgtaacattgaacttaaagattttgaagctgttgaagtttcgaagaatccaagaattgcacaaacaaatgaaactgggaataattcaggccataattttctactttcaattgataaaggatttttcagttggaattcatccattgtaactttgccgataacttccaaatttttagacttaaaatcaaatactgtaggaaaatactgtgaataaaacaataacaaacaaaatttcaggaaaataggatgctgatttgaatttactcttgatgagtttctttttaacttgattgaggaaaattaacagaaaggaaagcctgtaccaccaataattgctgtaaaacgatgatattcataataatgattaagtaaaaacataaatttttcaacagctgaatgaatgtgaacatctggaggtaatttggataaaataggatttaatcctaatattgagattattgaatttaaaatcattgataaaccaattgcagtaatgaatccacgaagtaaagtgccacatagaacattatctaaataaccgaatcttaaaattccaaaaaccaacaataccataccggataggaaagttaaattacataaaacatccacagaatcaactcctgcatgtttaacagttttctcaacagtttgaccaataatcattgaaacagctgcctctggaccaacaatcatttgaggaaccgtacccatgaaaagatacacaattggaccaattgccaatcccaaaagaccagaagatgtgggcacatgagctaaagcagttgcaaatgacatactaagtggtatttgataagatgccagtgttaaacctgccattatatcataaataagatttgacatattgtaatcacttatccaactaaaacagggtatataataagctaatttttgtgataatgaaagagattccaaagtctctggcgttcttctgtgtggtatcactcttgaattggagatatatgatactgaattataacttgaagattccattgatgcatcatctgaattgttaggaagagactgaggtggtggtattagaagtggagaattttccgatacttgaggtaacaaaccagttccctgtctacgaggtgagggcccagacgacattatatgatcaggtatagaatagatacatacaaagaacctatcaactccagaaagaaagaaagaaagaagtgaaaggtataattaaaatgtcaagcacacggcatgcacctattgtttaagtaaagcgtttctccgaaattgtgtggatgatcaataggaagttgtttaatggaagttttcattgtcaaagagacacctttcttttctgttattccatttgatctatactatcttctttactctggaaaccaaatggattctcaaggtgatgattcaacaatggagtatttgaatatagtggaaccattcccaatggaaccaccatcatacacttcaactttacctagaattgatagaccatcatatgattcattagaatcattaaatgaatcattaccaagatatagtccaacagtttataaaatcggtgttttttataggaaaatggaatggatttcaccatatgaaatggcacaacagagacaatggactccttatattgttgaattaaataatactcaattaaatttttatgaaattgataacaatctcatcaaaggcagtagtaatgttactaatggtatcatcaatcataataataattatgataaaatacttgataaatttaatgtatcatcatcattctcaaattctaattcacattcattattacatccatatcatcatcatcatttatatttaaagaaactgcaaggtattaaatgtccaagtgcaattaatcaattagataaatttgaaaagtataaagtttcatataatgaagataattatagatcaattatgacaactaaaactgatttaaaggcattatattttttaaaatccattaaatcattagaatctacgaaaattttcagatcttatagtttacaatatggtaaagttggattagcaattgattataagaaaagggattatgttttcagatgtagatttgaaactgaacaatttttaattgattttaaaaatgctgaaggtatgattgaatggtataatgcaattaatttaggtattgataattcattagatttatcaagacgtgaaatgccaaattatagaactgtaccacgtagacgtcgtagaaggtatcagaatcatagtgtgactaaaaatattgtttttggtttaggtttaacatcatcacaaatgttaaatgattcatacagacataaagaaaaagataaagataaagataaaaataaagatagaaggagtagttcaagttctagtagaagaggttctgttagtaatggacataaaaaattatttcatgtaccatctttagagacattatttaagagtaaaaaggataagaaggacagttcaggtattaaatttaattcatttaggagaaggtcaagtacagtttctaatcaagggaataatttaaggaaagaaataaagattaatcgaatggatgatacatcaaattctacaaatttattagaggatgaaggtagagatgaaggtgaagatagagatggagatgatgaagtagatgatgaagatattgaaggggatgatatggatatggaagaagaaatggaagaggaagatgaagaggatgaattggttgatgaagatgaagatgaatttaatattgatggaggtagaaatgaaggagatgaagaagatacagatattgaaagtgaagaaaatatacccattggaaatttaaatttaaatgaacaattaagaacatatacagaatacatttcaaaagttaacaataagaataataccaataaacatacatatgcggcacaacgtaaaatattaagagattcaattagatgtatgataccattaactgagaatgagagatgggttaataaactggttttattagattatcaaaagaattataaaccacaaagtagggaaatgattgatagacatttccaatgttttgaagttatgtcacatgtttcaggagttggacaaaattatgaacatagatttagaagaccattacaggaatggattgttacaccaagtggattaattgcctatatgaataccaatgcaggtcgttgattacagtataataatattatttattcatattattcatttatagaattcatttataaaagttttatatacatttaaatacattaaaagttgataaaggtatccgaagagagggtctcacttagaagaccgcgatgcaacactaataaactctatataggaccaaatctaatattattattatgaagttatttcaattcttccattcatttggacaaataatgtcacaagttgaagatatagtacgtaaaatcattgaaacatcaccagctggtaatgatgaaataattgttaatgatattaaatcattattaaacaattccgattctaataaattaatttcaaaattatttaatgaacaatatactaaatcacttaatgaaggtggtgatattaaattaattagattaaataatggtaaatatagtattttatccaattataattataatagagattataataaatttttcgatataaatgaagaaattcaatttaattatgattttattaataataaagtaattgatattgagaatgaattatctagtaatattacaataaatgaagaaattaacaatttacaaaaacaattgaatgaatatttaagtgaatattataatgatgagagtattggaatggttataccatttagtgaaggttataagataattattgttggagagagacttaatgatagtaattattataatggtaaatgggttagtgtttattcatatgataatggaaataaaggattaagtaatataagtaagattaagattcattattatgaagatggtaatgttttattaaatagtattgaagagagtgataatattggaagtttccaaattaatgaattgattaacgagattaataaatttgatacaaattatgagactaagatattaaagaagattaatgaattaaatgagaataaatttaagaatttaagaaggttaatgccaattagtagagcaaagattcaatggggtaaatcaattggtaattataaacttggacaaaatgttattggtggtaagtattaattattaaatgttaattaattatataatttaactatttgtttatttagaaaaggtattttattgaataatatattaataagaatataatgaaagcaattgcagataatttagtaatttttggattactacgaattacataagttaatttatttgcagtattccttaaattatcactaagtaaattcatttgatcattaattgaatttaaattattattatcttgttgagcataattatttatatcatttgcaatatttttgaaaattgaaactttatttgcaagtgcatgaaattgttcatcattattttgttctaattgtgaagctcttgacattgttataataagatgagatgagataataaaggactgtacagatagatagacagatagacactacatagtaaatagtaaattacattacgcgaattaccacttgaaagctctacctgctaataatagccaaagtttctagtctaagcacaacagtgatcatatattaacttcaaccaagtgtttgaagcactagtaggtttactagctaatacgtttcactcacaatgcagattttgcaatcaaaaagggaacctcaatcacattattttcgaatgtgaaattatcaatgagtactgtatacatcattctaaactaaaaaagttatataagaaatttaaaacaaattcagaatttaacttggcagaaataaagaaaaatcataatatacaaaaacttataatgctattctaccaagaatcagcataaacaaaattaattaagaaaaagaaacaaacacaacttgaatacacaatataataaaaaaaacaatcacaaaaagtgaaggttcaaacaatcaaagaaccaatcaaagaaccaagtaagtaacaaatttgtaaacagtagataatattatgtaatcaagtatataatttaacttcgtttgttccaaaaagaaaatactatctccctatatattattactattatgataatacaatcagttaaataagttggtcgcatgatatatagaagatccataatgaagccggcgagcctcgaatacaactatttctagaacgcaaattatacagtcatcattatattattataatagtaatagtattaagagaaagtagaatagtttcttgtctttaagagttaatacagtagagtatatcatccattattacttaatatccacccttttatagtaatagaagtatttagttaaatactgtgaaaattatataaattatagaaattaaaaaattcgcgaaatatactagcacgtgacatcctacagggcttaaaccctctctgttattatctctactttcctaattgggaaaccaaccctccacacaccacgcatttggaaaaaaataatttttttctttccatactacatagtgaaaattctatcatgattattaactattactattatcatcattatctactgaaattttattcattatttacaaatttatctgtaatttatctgaattcctatcttaaaatttctattatactttcatataatctatctacatctacaaatcaaacaatgtctgcagaatctaaggtcgtttcaaccaactggagattagtccaacttggtagagttgttttagttaacaataaattagcaacaattgttgaaattattgatcaaaagagagtccttattgatggtccaaatgttgcaagacaatcaattagtttaggtaaagttgttttaactcctttagttttagataatttaccaagaggtgcaaaaactggtatcgttactaaaaaatgggctgctggtgaaattgattcaaaatggtcaaagacaagttgggcaaagaaaattgctcaaagagaaagaagatctcaattatctgattttgaaagattccaagttttagtcttaaagaaacaaagaaactttgctgttaagaaagctttagcaaaggcttaaattttagtttaaaattaaaaaatcatttataaaatatattatatcaatgttatattatatcaatatcaaatataaaaattaagttaaatttaaaagaacataaaagaaaggaaagttaagtttatcttgttatatcttcatttatcaaaatatactttcctttttttctttttcttcttctttagtaaagtaatctattatacagtaatttattatatatatatatatatcataatcattatcattatcattatcatcatccaatatttttaagtaatccctctaataacatatccggtgattgcttattatcattactactatcttcttgctgattactactatttgtcagtttggataatgtaatagataaagctggatcataatcatcatcaggtgctggtaatggtatactattattattattaccagtactactaatagtagtcctactttcaactaccttctctttataacttttattcttatcttctcgcttcttagtatttaaccttttattacttgaaacaacatcatccatatcacgttgaacaacaaaaactaaatacatttttaaatcattaaatttattaatttcattaccattatcatattcatcaatttctaaatctaaattttgaaaaatttcatccctattaaatttatttaaaataattgaaaattcatctgcatcaatcattttctcccttgataatgataataaataacaatctttaacaaattttaaatgatttttaataactccaaatttaaaattattataataatatttccacatttctaaaaatttattaccattaattaaatcttctttattaaatttaacttcataaaggtataaatctcttgaaattgtaatcttatcaagatatttctctgcaacatccctatttaatctaccaattgtcataaattcacctttagaattattactaaattcatttataattcttaaacctctatcaattacaatatgtttatcatttttacatgttgatgatataaaatctaactgaacattcatattgttgatcattagtcttaattatacctttccatatatcattagttgatggtaattctttaatttcttcttcctcttctggtgtataatgaaatattatcggtttatcattgattgtaacacttttcttaacctttttgatctttttctcctcaatcaatggtttaacattctctattggcttaatattaattatattttcaaattcttcatcactaagttctctaatgtcattttcttatcattatcattatcatcattatcatcactttcgtaattttcattattataattaattttattatcatctttatcataatcttcaacactataatcattaagtagtttgaatatcatcacgttcatcattattaacttcctctttcatattttcaacttccttctctcttttatcattaatatcaaattgaaattcagaatctccaataatttcttcacctttatgtgtatgtttaataattggttgaacatcttgctttataacaactttattaattgcatctcttttaactaaatctgcttgttccttcatttcctttgttaacatatcatcttttgataaattaggtaattcttcaattttaaattctccattaataacacgttctacaagtttagatatttttaaatttaaaagtaacatacgagatctttcgatataattatttggatatttattaaataacccatcctctaaaatctttgcccatttcaatgataattcatcaattgaattaccatttagtatttcattattaacatctttaggtataagtttctgtagtttaattttaaaattattaacaattttgggacgtaatgtaataatactattattattagatttggatttagatttagatctagatcccgacgatgaagaagatgacgaagttgttaaagaagtttttacttttttcaattgttgctgtggttgttgtcttgtgacaagttttctcttcaatggctcaactttaccatttaccatatgttctttaacaacatcgtcataatcatcacgatcaacatttttatcattataatcctcttcatcattatcattatcattatattcatcagcaatggtaatccctctatcctttaaatatttcctataacttatttttttctttaaatgttgatatttttcaggtaaacaaacatcacataaataatcatcaggtacatcatcttcttcagcatctttaccaaacatacatttaacatgttgccaagtttgacatttatcacattcaaccattgcaccattaggatcgttatcctcatcatagttatcgtcagttgtattacaaactaaacaacgaacactttcatttggtataggtacatagaaaggctgtatttgacgattaaaattttgattatcatcattattatcattataattattagaccaagatacaacatcagcgtggccactatggacacctttattggccctagctgatctacgtacactcattacaaaatgaattacaaaagaaagaagtacagtaatatatagagatacaaaattttccattcaattccacagttaaggattttccctcacaattttccaaacccttccttgcaatgccgccactgcattcatttcatcttctgccttctgtactttacgtatcgattcagcaaattcctcttctgccctaacatcaactcgtttaatccaattgtcaaaattctcttctgtgaattgggcaacttcttcatcattcttattattaatcgcatattccagtgcttcaatttcttcttgaaatgttaatcctctagtcttcattagttgtaaaattgatttatgtcttgtaaattctaatctatccttatcactgaaacatgcaacaatatccttaacaacatcttcaatatcttcattaacgaaaacgcacactgcacagagaaatactttatccaatcctgtaagtacacttagtttcctgaatgtgaaaccttttgatagtaaaaattcaactgatgcaactccattcctataatcatcaactactctcttccatctcaatgcattcattgatcatccatagagaaagaggaattctttgaaactgatataattaactaagcactaattttgattattcgcttacagaagcaacaacatgcataaataatgcagtaagttataaacatcaacaagttgtttgtttctttctttgattcttttacttttatctatagatcaatgacggaaatagatttagatgtacctagtttaatgtctgtggaatatccattaagggtactcaatacagagaaggcaattgaattaattggtggtgaaactgttttaaagcaatgttttatagatcctgatttaagattacaattgcaattacgtaatgatccattatcacatcctattagatcaagtgtacaaaataataagaaaaatgtattattaaagtttagaataccaaagagaatattagatggtaataatggtgatattaggaaatctattaaacaatgtgaaattgaagaaatcgattatactgttaaaacttgtggtttattaagtaaaaattttaaatttagagaaatgagtgatttccaacaattgaaaagaaattccgattttaataataaatttaatgaatctattagagttggagattttaataaaatttgtcaattctctaatgaaattggtggaaatattgaaaaaattcaagaatttaataataatgatattgatttaccttcattagttagatttgcaagacttgatttaccttataattataaatattttggtaatttacttattgatgaagatggtaaatttgttaataatgcagttaaactttatggtattcaaattaattataatgaaaaacctccattaaattatgatgaaagattacaacctgaattagagaaaatgaaatttgaaatggaagaaattaaaaatagtggtattgataaatcattaattgaagagagtacaccatatcattttcttaaatgtttagaaattgtacgtaaattatttgaaatgaaacctgtttggattagacgtcatattcattggttattacctaaaaatttaagaaatcaattaagatttacattaccttatgtttcatatactgtatcaaaaggtccattccgtcattcatttattaaatttggatatgatccatctaaaaataaagaagcatataaatatcaaattgaagcatttagaggtaattctaaaagtaatcacgatgaagagattgaaaaaattatagctaataataatattagtgacaatacaactactgatgaatttgggaatgataatatttatatgattccacctacattatatgaatatattgaagaattcagtgatattaatagtgacattaataaattaggtattggtaaaatacctaaacaattattctttgatggtaaaaatccatgtaattcattatctttccaacttggagatattttagatgaagatgttaaaaaattaataaaaaactgtacagttaatgataaatgtaatattgataatggttggatagatttaaagagtatggctaaaattagaagtgttatgaaatataaacttacatgtgtacgagagggtatagttgttaatgatgagaaagtattagagattatgagtagaagtgagaaacgattgagaagtattgaagatggtgggataaaaaaagaagaggagggtgaagaagatggtgataatgataatgatagtaataatagagaaggtgaagaagaaggagacgaagacggtaatgacaataatagagaagatggtgaggaggttgatatggatatggataatgaaggtagagatttcggagatgaacattccggagaggaaatggatattttagagagacttagattgttcaatccaaagggtaaagacgtattgaaggagataaaacagataatcgtgcaagataatattatatagctgaatatgaatataaatatgaatatgaatatattataaagagtagttaatttaaaaaagaagaatatgtgaattaatattaatcattaaataataattgcctatttagtaaacttatctacaatataaatttatctaatctttcatatcaaacatgtatttaacggtttcctttggagaatcacccattactgacattctccaatgtgcaatacgtgtaagttgaccaattgagactgtagcaaggaagaaattaactgatgcaagtaaaaaattctttggaataataaccattgaccatcttgtccagattgcacctgttgcaaatagagacaattgttgcgtcgcagagactttctccacaggacgcatcatttcatttgcacctgcaagaactaatgcccatttcataacaggagcccaaaaatggacagtcttcggtcctgttggggataccataaattttgcaaatgctgatgacattatctatatttggttgtttgaaagaacgaaaggagagtgtaacaggaagaagaagaagtagttaaaataaaagaaaaggacttgctctatgtaaagtttaacaatgctttaatgttttaaaaatgaggagtaaaattatttaatgtacccaattgagaaaaaacggtattttacattatgtttatattacgaaacaaccacaattgatttcaattgactctgcaattaatggaatttagtatagggaacgatatcaaggacggttttgatagaactagtgcttgggtttctgcaaatgttgatgccgtcaatgatatagctaatttttataagcagagagctgcaattgaacgtgaatatgcggataaactacaaagattatcagctgaatattttgctaaactggcaaaacaatcatctgttttatcagtgggggataatccgacaattacccccggttcattagaatctgcatcagttgttgcttggagagaggtactcattcaatgtgaaaatatttcaaaggaaaagaaatcattagcttcaaaatttgatgcacaaatttcaactccattaaatgcaatgcataataaatatgttaatttaaataatagatggaatgaatttaataaagatttaatttctaaaagagatgaaaattattctgatatgtcaagtaagaagaaatcatatgatttagcttgtcaatcaatggaatcacagagagctaaatccattaaatctccaaataatgaaaaaattgctgaatcattacataaaaaggaaaatcatatgaatgttgctaaaaacaattatcttatatcaattgctgtatctaatagattaaaggataaatattattatcaagatttacctgaaattttagatggtttacaagatcttaatcaatgtagagtctctaaacttaacaatatttggaaaacatctactgatattgaaaagaaatcattagaaaaaatatcctcttgtttaaccgcaattgataatatcgttgtacaaaatctacctcatcttgatactgcaatgtttataaagcataatctatacaattgggcagaacctactgattttaattttattccatcagctatttggcatgatgatcaagatatggttattagtgactcaaccatttatgatttgaaagttaaacttaacaattcatgttcaacttatgaaaaatataatactatctgtaatgatgaaaaacaatcacttgaagaactcttatccgatagaaaggaaatgcttaaaaatgaaaattatgataaattagaaaattcattattaaattcaataacttatttacaaaaatttacaaataatgatacgaataaagtggttgcagaagttgaaattgagacaattcaagctgtaactcatgatattgatatgacaattactgatgatcaattacatacgaaaaaatccaagtttagtcttttcaaaattaaaaaggatgaacaggttaatgaacctgtggaaatcttacaactttcagaaaacgttaataatttccaaattgattcatcaaataaaaaatcaagacttttttcatcattaaataaattggttgatgcctataatacccctatcaatggtgtagcacaatcatctacatccatttcatcatcatccaatgctgttgcattatatgattatactccacaaggtgatgatgaaataccaatttctgcaaatgaacaattaactatacttgatccagatgattcaggttggacttatattaaaaatgcatctggtatggaaggtctggttccaacatcatatattaaaactatagtaaagaagaagcaacccccaccaaaagttgtaccacgtaagtctgttaaagctacaaatcaagtacgagttttatatgattatgaggcacagggtgatgatgaactaaccgtaagtagtggtgatactgttgctttaataaacgacgatggatctggttggtcagaagttgaattaaatggtaacataggattgattcctacaagttacacaagtcctatgtaatattaatatgtaacaaaaataaaatatataatctataaacacttacgctggtggtaagaaagctccaaataacattggttggataaaattccaaatgaaagtaccaaataagtatattgaaatgaatttactatcattcaatacacgaactaatttattctctttcatttcacattcataaacacctaatgataatgcaataatggtaattggcaaaaatgaggaaactctagtgataatttgaatattcataaagaaaacctgtgtaaataaataaacccaactaatatagaccaaccctctaacagatttaatattccacaatatcacattcattaaggcaatgaatagaacagttggtagtgaaataatgaaattgggtatattgttcaatgtaaaataatttaagaatccattattccatctagtaacttgaagatacgaaactaaagattttgttgttgaattacaccattcaccacgttctggacagtataagaagtatggtaagtatgttaggtaaatgaatgatatgaaaagtatcccacctgtgaataaactaagcaatttatcacgtttcctagaaagtgtgaataaatcattcaaatataatatacccattagtaaacaatttgatctgataccgaaagcaactgaaaacataactccggataataaatatttaactttactgttgataaatgttttggactttgtaaaagatgataagtaaagataaactccataaaatgtgaaaaattgtgccggagtttctgaataacatatcaatgatatgacgccaatcggtctaagataagtgaataaattaaccgtgtatttgaatcgatggatacatcccttgagataatcattccttattatcaattccactattttctttgaaatttggcatatttggtataataaaacacaatttattataaaataacataatgtaatatcataaacattcatttcatattggaaaatagtattaattaaaacacgtaatttatacatgaatctccataataagggtgcaaaaacccattcatgttcataagttagtccttccattgataatttaagaatatatacactatcccatgacatcattccctctagtattgatttaatgaatggatgatatatagactctttactagattgtatccgagttatgaatagttcagttgacacgtcaaatttaggtaacattattaatgcaataatttggtatatgtacaaacataataattgccaattgttaagtgtaataaagtcattactccatattgttttcagtacctgtttcattgattatcagtagctaaacccaatcctaacttcaatgataaattatcatgattcagtattataaagcgtaataatgaaaaatatggagataattagacgcgacgtttgatgtcatcaattataaaaggtgttatacagagggaagatgataagataataaagtgtgtgaatgaacattgatggagtattgaagttgagattgtatacttaccaaacatggaattttgtattgctttcattacattttggaattacagttgaagggaataactataaatgaaaaaaagggtaaaagttagtaatgtataaagatttggaacttgaacaattttgaaataagatgtatcattaatgttgtgttcagttatttggaatacttacaattgaaatttaaagatgaaaaggggaaaactatcaaaatgaaaattaaaatatataatatgttggaaaataatctttgaaaatgaaataatatgactaaactagtggaaatttataaatgaaattagtaataatatatgctaaacattaaataattcagggctttgggttcgatacaatttggttgagtacggcgattctcagcggatgttgataaacagttgtgaatatatattatatatagttgatacgttgaaacaagggaataaaataaaacttgacaatcattttccatgttagcacaaatgggataggttgaactattagaaatataggagggggtggcggtgttgttagtatatatgctattaagagtgtttactctcaatgctcattcacacaattcattgtcttcttcatccttcagaagatatgtaacaacagaggaaaaagaggtaacaggtgaacattgaacctggtgaaaggtcatcatcactttcactacttactatcattactattaattgattacgtaatatctctataaattctattaaacaccgtgtattcttctaatgtggttcttcaaatgatcagatctcttaaatgcttttgtacattcaatacaaacaaatttagcaatcttcaaatgaatacaatcaacatgtcttttccattgtgatctctgtctaaatactttaggacaatctgcacatttatagatatctttttcttcaaatttttcaccaccttcttcaacaaaactggttggtttagcaattcttaatctagttatttcaggtactaaatgttgttcattctcttcaattttatgtttggaaaagttatccttgtttaatttcattgattctttgaatattctttgaacaatttctgcatctccactttctttcatatttggatgatccctaatggtataactatcagaccttgatgtttcatttattccatttctatttccatcaccttcaaaatctttttcattatcatcatcagtcggcttaactttttgatttttatctctaaaatcaagtttacccctaccacgagctctacttttaccttctttatttgatgtaactctgcttttgaatttagctttatttttattattggcattattagtctcaatttgggatgtcagtcctctttcaattgaaactggactttggagataataattattgttaaatacttggattactattgaatggttttttataatctggcttccatttcatttgatgtttgggattttgattatccaatgtttgttttaccctttgactatattttctattatcatgatatctcatatttgatgtttttctcatttcatttcctacatttgtttccaattttgttcttaaaataatattatggcttctgattcccatcgtcttcctttttattgatattatcattattatcaatatgctgctcaatatcattatataagtcaaaatggttataattatttatctgaattacattattttcaacattattaatatgaatattctcatatgctagtccattgaaactattctctgattcgtcaattgaacttgaatcatcactgcttgaatctgcattatcagaacttatattattatttttatcactattatcattacgttcttcattatcgtaattataattgctatcaattctatggttaatgttattttgaatattaatattgattctattataatcatcttttctctccgttattaataaattattgtcattataatcatcatatccatgtgcttgaaatagtcttttaggtggtaaatcaactgagttgaaaatagcattatttaaagtttctttgatttcatcccttggagatgataagatggtgtcatgatttctattaaaatatgagtgatgggtattgtgattaaaataaaaattattattaattgaacgagtcctacatctttgagtttgttcgcccattgaaggttcaggtattctgagaatttccacaactgtcaaaatttaaacttctatgaatcgcttgaactaattttttatctctcaatctttctattctatttgaagcagtaattattctgattgaatttatattatttggtgatggagtattatggaaaaagattgggtttatattttcatcatttgtgttttgagataatggggtaagattggaatctaattcgaaacttgttgaatcaagacttttatttgatattgaaatctgattattataaattgaatcatcaatcaagtattcttgataatagatgggttgtgaagcttctaaattggaattgaagaagttatcttgaccttttgaactaacatctctaataaaggattcatgttgtgtttgtaaatgtttgttttgcttcagtatcttttcagcaaattgagaacttttaggctcgttagattttataattgaactattacgaggtgaattttcattcatattgatgctatcagttttactattatttattgtttctgattttgaagtatggaaaatacaattaggatccacagtttgtaaaattcttggatcataatttgaaagagcagattgtggtaagtgatgatggttatgataattatcatgaagttttttttgttctttttgccttctttcaagagttgttgttggtgaatgaagtatacgattttgattttctttatttgataacaggttaaatggatttatattttgatgaaattgaatgggtgttttcggtctagctctgtctaattgaaaaatatcttcacttcttttcttgatattttgaacttgattgttatctttcaaaatttttgaatcgattaagtgagcacttgatggattcgaggaatgttgtttaatagtagaatcggaataaatgatttgatttttcaaacttgttgtatcatttcttacaaatacatttgttgattgattaatattttcactattgttaattttatcaaccttatcaatatcattatttttgctattatgcaattcattatttaataatttaataatttcattactttttacaggtttggtattattatcattattatcattattagcagttgatactgacttatctttaaaatcagtaaaatactcagattttaattttgacttggtagtagttgcagtagtggaattagaaatattcttgactttagtactaagctttcccttcaattttgattttgatcttgaagaaattttaagtttacttttggaaattttattaaccttatttgaatctaactttctattgtaaggttttttcaaagtatgaattgttttatcatcattattctttgaatttgaattgttcatatcaattgtgtcatttgattctgatagaattttattaaattcattattattattattattattattattattattattattatcaaatgtgattaaagtttcctttatgaataattggaacatcaacggctttaatagcggatgaatttaaaggtaattgaacatggttttgagttatagcagaacgtctagtaagacgagccatgacaatttattatattattattattaattttaagagaagataagatagaagaatgtaagataactaataaagataaacgacaaaaggtaaagaatgataacgatatagataagaattgaaagttctgattattttaaaggttaattatacttgattatgatgctataatagaatcaaataagatataacaaaaagaagggcaattacaagaaaagaggcaataagggcaattgaaaagggtaataaaaagggtataaaaaggggataaaatgagcctccaaattataaaataaaattattttctgatgagcctccaataataaaaatagacgcgacactgataagacttggcgtcgatgcgtctgtatcttttttaggtaatcttttttttttaccctttactggctttaatgaaaacaatagtaatcagcgtataatccctataaatatggaatcccacaatttcccaccacttcccacaaaaattcgctcttttcgctatcaatttgataaaggttaccgatgatgaaatgataaaaaagctactttctgctaatcccttattctattttctctaattaattaattattatttcatccttttatcttcttttataaacctttccttcttttttaaactcaattgtattttattatatattaatatcagtatactttactttacttcactttaatatattttctaatttaattatctaattaattgattaattcttatattattgcttaatatacttattatacgaacccagccacttctccactttttttttacaagtcaactgatcgaaaggaaaagaaaaacaaacaaacaataaaagaaaatggtaatggctacagcaaattcatatgctgatacatcttctcatcattcattaacaagtaataaatcaaatgtttcaaaatatagtgtttatcaaacaaatgataaacctttaagtaatgaagcaatttatagagctaaaatgaaatatggtatttttcaataatcctgcaagagtttcaattggtgttgacccttcagcttctgatactgctgctgttttagcagctaatactgatctatcaattaattcttattcaaaggaattatcatctgaagctgctcatgctgctttaattgcaaagccagattcaattgttggctggaaaagaaatcgtgttgctcctgaagctgaatatgctgcaatgtctgctaaatcaatgaaattccctttcgataattttgatacttcttcaactgcaattaatgatgatgctgcagctgctgtatctgttttaaagaaaactccaaaaaatgttgctagagaggcattaaatgatatttatgaattcgatgatgttagatctggtaaagttaccttatctaaatttcaagatgttaaatcaaataattctctcaaaaatttaaatattaaacaagataatagaggtggtgttaaaacttcaaatttagcaattgaaaaaactagatctatgaatattggtaatattactaaaaatgcatcaaaggctgctgatgaattattaaataaaagattaaacccagaaaaaaatcatagatcaggtcttaaatcaactttaggtactgataaatcaactattgattctaaaatttacattaataatatttacaatcaatcaatttcagcttctaaaaaagaattaagcaaaacttatactagaagttatggtctcgagactccttctgataaaggtttaactgtttacccatccaactttgccgcttctgcattaaatttgaaaccttctaaaaatgaaaatgacgttgattttgaagcaacagttaaagataatttacttagttaataaaagtatttatgcctatgcatcagaaaatgttaataagaaattatctaaaatggatgctgatgttgcatctcaaaacatattctcctaatgccaagattaatgaacgtgcttttatagttgcacaagaaaatgctgctaaaagaaaagcaaaagatgttccttatggctcaattgctttaggtggtggtttagttatgaaatatgatgaagtccatcaaattgcttcttcattagttcaacctgcaatttctgatatggaaactagaattgttgaaactaaaacattagatcaacaaagaaaagaattgcctgctaaaattagagaaagaaatgctgaattaaaggaagaacaaagattagcacaaattgcattagaaaagaagagagcagaagaagcaaaggcaagaagagatcagttagtcgttgatcaaaatgctttagaagaggaacatgaaaataaaaaagttgagttatcaggtatcttttgacgcaagagatgaagagttccaacaacaagttactgaagaggaagcagcaaagaaggagatagatgatgaaagagctgaaaaattaaaagttcttaatgataccaaggctgaaaaggatgcagttagagaagaagaacttaatcaaatgaaggctgaaagagatgaagcaattgctcctttgttagaagaacatcaaactgaatcagataaactggatgaacttgtctctgcaagagaagctaaagaatccgtttataatgaagaaaaggctaaagctgatgcaattcaatctgaattagatgaaacattatctaaacttgaaattatgaatcaacgtattgcagaattagaagctgatttaccagaaatctctaatactgctgcagtttctacatctgctgcactggctgcagaaacaagattaaatactgatggtaaagaacaagaatccaaattagaaccattagcagaccaaagaaaagaattagaatctaaccgtcaagatttacactctaagattgctgaaaaatctacagaattgaaatcatcagctcttgaacatcatgaagaagaaaagaaaatcaatgaattatatccagaacatttacgtaaagaagttgaagttcctggtgaaatcaatgatgatgatttatcagattctaaattcccattagatgattcaacaattgatattcctccagagattgaagaagaacctgagaatgttcctgaagaagtatggccaaaagttgaagaacctgaagttgaaaaacctgaagaagaaccagttgaagaaccagttgaagaaggtgcagttgctaaatcatctgcaccaactaaagttgtaaataagaaaacatgggaagaggttaaggcttcaggatatgcagaaggtggtgatccgttagttaatgttccaaccgctgaaaaacctccaatggcagatgttgttgatcaaactaagattaatgaaagtattaatacaacaaagaatttcaaggcaacaaaggctactggtgctggtgctggtaaaggtgttgcaagtgcaagaaatacccctgacaaatcatcaggtaaatcaaagggattatttggttttttcaagagtaacaagcaacaaccaaaacaagcagttgcttctaaaccagtctctcaaccagtagttgttgattctgaagctgcaaagaaaaagtttcaagggattacaaactgaagaaactgaaactaaaccagttgaaaaaaaagcacttgataataatgatgaagatgtatttagtggattctctcaaggatctgaaattgatgaagcataattctattattatcttctttctttaagctgctgtttttttctttactttctggttttagattcttttaccttcatctgttctgtctactgttgtttttttactatattttattactaccacatttgcttcaagtcatcaaatttgattattttcaattgaaaacactcgttttttttccaaatttactgtttttacttgtttttcatactatttgagtttcacactagttccacttatttttatttacagttttttatttactttacttctgtatccgtatatatcatcttatttgttaactattattaaccttaatgcagtgagcttaacgcgttgctggtttgcacagtttcctaattgggaaaaattaaaaacttgcaactgtttcatgaattccgcactttctttaaaaaaataaattggccataataatagaactaatttggaatctttgataatgaacaataaagaatctgtttgtttcaggtgtaagaattcttgttataagatagaatctaggaacaatggcaagaaagaaggttaaggcaacgccaatggtatcaccaactacaaaatcaagtagtaaacaaagtaaaagtcatagtggatcacaaaaaagatcaagtgatgataaaccacgttcaagaaaaagttcacaacgtaataaggaagaagttcgtgagaaagaaattgtagtgaagagagatatttatgattctgatgaggaagaagcggaatgggcaagggagaaagtcaaatcaagtggattattaaataatcaaccaggagatccagttgaacatcgtaaacgtagaaatagaaatggtacagttgcattaagagaaattaagagatttcagaagagcacggatttattaattagaaaattaccatttgcaagacttagttcgtgaaattgttcaaggagaatttggtaatgatgcagattatcgttggcaaagtgtagctattttagcattacaagaagccagtgaagcttatttggttagtcttttagaagatactaatttatgtgcaattcatgcaaagagagttactattatgcaaaaggatattcatttagcaagaagattaagaggagaatagataatttgtacgaatttgctaatatttctgtaattttatttgttgttgttgttgttgttgttgttttgttttgttatcatacccaggtatgaaaatatgtatttttattgttattaaaggtcattatagattatgatgattattattattcttttttatatattggttgtcttctcttaatagttttatattccttaacatgtgtttattcgaagaaaaaaactggatttcttttctgttgtttttgaaagaattaaaattaaacttaaaattacataaataaattataaacgaattgaccatattgcagttggaccagtttcttcataagagtcctttgttaaacaaaattcattaccttgagagaatacttgttttgaaagaatttgagcaccaagaaatgagcaatcttcaaatccactttttcttccattcactgaaataatcaacttttggtactaatcttaaatgtcttggaacttgtgttaatgaagcatcatcaattggtctaatatcatttctaaattgtgcttgtggttgaagtaatttattatcagatagataaacgtaattatcgaaaagatgaaacataattttttccttaagaccctttattttacttgtttgaccagtaaaaattatattatcataacattcttgtcttttctttaaatctggaacttttcttaaacaatgataaatattcaatactaaatcttcaattaaatcattacatccttgaaatctttccttaccaacagttatttgatttccatcaaaatcataaaaagtatttgtctctaattctgagttcggttttaaactattcttttgtttattcttcaatttatttgtattactttctaaaatttctctagttgatttttcacttgtaacaatagctgcaatatctaaaacaccatcttcatcatttccattaccttcaccatcatcagtatttggaagattttcaattaatccttccataccaaagaaagatttttttgcatcttcttcacttaaacattcaaatatacttgattttttcaaaatttctatttgctttgcagttaaattaggtaaaagtcttgataacgtttgattaatagataaactacctttatcaataactttcttacttggagaatataattgatagtcaacaataggtaaaatttctgatttttcatatcctatatcgaattactattgaattagcaattgaaccatgagcaaacatacaagctaattcaaaaggtacaatggaaaatccatgaacattcatattttcaaatgcactattttgtaagtaattcaatagataatggtgaccatcttgttgatgattgtattataagtaaattaactgattcaattgataaatcagttaattcttcatcttcctctctttcctttaatactgtgacaattaaagtatgtattaaaaattcaagtgctttaatatcaacaattcgtcctgcaataatcggacgtatttcattatatccctctacatttgataaactataatcatcattatcattacttttataaacaacagttggaacagaaagttttggggtttctaatggatctgttaatcctaatgaaagtaaagtatgttcagatcctggttgcacaataaaatatgtgtcgtccttataaccacctggtgccattactctaataaagtcagttctatcaaccaaaagaaacaactattcacagtgtaaatcaacaattataccatctttaagtcaataaattctcatgttgtcccaagtctcttcaatttcgcgatattttcatctttcactataaaaggagaacaatttccacttttttttcaacatttgtattttctatatatttcactctcttttggcatacttaccttgagtcgacacgggagatcattcaaatccgtcagtgtctggacagtgttggctggcattgcacttatctgctgcttctctgtttatcagcattctccctcattgagtggaaatgtctgggattcgtaatttttgagttcttttttttcttaatatgaaatgaaatctatgacattgtcaggaattcaatatattatttaaattttattaatctatacacctagttacttatacagtttatgttgttttaactattgcttcataaacaaatttcataaacatttgaagacttatatcatcagtcagaataactgcacctgatgttgcatcatttggatttgtttgataatttgtaatatcatttaattgttgaatttgattatttgaataacttgtagttggatttaattttgacattaaaaatcttgcctgtgatccgccatcctctgtatcaataaatcttggtaatgggaatctatcaactaaaatatctgctgcctcttttcttggtaattctaaaaattctttaaaatattcatattctggtaactcttgatatttttgtctacgccaatcagcaattattgatccgtgaaatattaaaatatggaaaaatgtatctaaaaataaaattctatttggtttaattgatgttgaatctaataatacaggttcaggttctttatctaattcatatgatgttaatgttggttgaatcattgttaatgaattgaaacaatcttccataaagaaacaatgacgataaaatgatgtctcatctggtgatgaattgaaaatctgaataaaatttgaccttcttaaatgatataaaaattgtggtaataagttgatatttgttggtataataattgaacttgcatcatttattcgaaatttacagaaaatagacatgaaatctattaaaattttattaataaactttaatgattctgcatttgattgatttaaaactttataaactgcttccttagcaattaaaacagtggcaccttcttgatcaaaattatcaataactgaatccattgaatcattacttaaattaatcattctttgggatgttgtgacatgaatatgctgtaatccatcagggtgttgataacttgttataaattgaataattgatgaatctccaataacattctcatctaatgtaaagtaaattgaatatgttgaatgatttgaaattgatccaagtttgaaaatatttgtaccattaataccaatattaccctttgaagttttctcagttgaaaatttgattttatctttattattattattatctttattattcaaatataatggagatccatgaccaataaatcctttaactttaacatttttacatttaatttctaatgttgaattaagaccaaactgtgattcaccatattcattaactgatagaaatttaatgaatgattgtttaaaaatagcacttgtgaagctatcactttgaacaactacaccaccagttttactaactaaacattccatttcacttaaaccaatttgatcataacagccaatgaaaatatcaactgtatgaccattaattgaaacctttttcagctatatcttcataaaatttattactatttttgaatcttttgaataactttagaatcttttaataaatcatgatgtgatcttaatggattcttgaaatgatgtttccactatttgtccaggtccaattgtacatggaccacctgtaaataacattattcttgaaccaatcttaggatataatatacttaatatattaaaatgcaacatttattgcacaacctgttgatctttcatttctatgatatgggagaattttgaaagaatcttttttcaatgactcaaaaatattagttaatgtaaattcacaaatatttgtttgttgaacaaatctattagttatattacccttatttaaatttgaattaatacctaattttttacttatttcatctttggtatattctttgaatccattaaaagtataacatgattgatgatcatttaatcctaattcataaacattaacatgtttaccaaaagttattaacataatcattgaatttggaggtaaataatcaattgaattaattaaactatcccttaaagcatctaattcatcaatttcaatagctaaatcaacaacataagtgaaaatcattggttttaattgagataattgattattattttgtaatggaggtattatatattcaacatctaatgaacttggatctaattcaattggtaattgatttaatacattaggtaattgatttctataactacagattgaacaagaccaacttttataatttgaatcaagtatacagaaaggatttaaaattgatttacaattaaaacatgcaattggatatgattcaattaaaattggattttccttttcctttaatggttgataaagacatgaaattggtattgtacattttttctcttgttctttatttcttgggaatacattgaaggaatatttcaatcctgttaaatcctcataatcttcaaattgagtttgcattgtccccatctataggaaaaaagtttgagatcaagatcagtatccttcaaattaacatgcatatttcatgtattgaacaaattctcaaaaattgtcaacaacgccaaacaaacagacgcgtcttcaacaacttacacgcttttaacattaaagtacttcttcttataaatagaagcatatcgatgcaattaacatcgtatatatcgttaactgatatagttctcagtaaggtgaatgataatgtaccattgagagtaattacaacttgctatgataatgaaaacgaaggtgaaatagaggatggaatggaaatggatgaaaatatcagtgttttcgttaatttaaatttccaatcaattacaccaaaattagttaataaagtattaaagaaatcatcaataagtgtaataaatgtacttgatttaaatgtattttatgaaatagtgaaaaaagattatgatggattggttaattatggttattatattattgatggattaatattatgtatttcagagttattcacaaaattcattagtaaaattaaagttgattatgataagtttaattttagattagtttatttgattataataaaacttatgaaaatgaaagaaaaagaaaaagattgtcgaatagagataaatgaaaatgaaagtgtttgggaacgagttgatcaaatttatttaccttgttcaagtgaaagtacttatgatagattagttgagtatttgagtaaatcatcaattgagacattgagtatgagaaaggaaatggtttgggggactgatgagtttatttgtttaagtgatattctagaaaagtttaatattaagaaggaatgatttaaaagatttcaattaagaatttaaaagttacaaaatgtttataaaagcctaaatagaggtttaagttggagcccatggatgttgttgttgttgcggttgttgttgttgttggtatttcattaaataatttgcactacctgtagttgttggcatttgaggttgcatttgtggttgtaattgaggttgtaattgaggttgttgaagttgtggagatatttgattcattcccataggcattcccatatttggagaattcattccgttgatcatatttgaactatttattgaaagagatgaaatatcaggatagttagtattagtattattggcagtattattatttaatggatttgaatttgatattaaattttgataaatttgtaaactattatcaatatttgattgtaaactttgtaattcaagtaattttaatttatgtaattcaataatttttgataaattatctttaattgattcaattttttgaattttatttgggaaattatttttcaataaatttgattcaaattgttgacttgataaatttgatgattttacctttttatttaaatccattaattgagataaagttgtttcaatatcgaaagaatcatttaatgaattaattaaattttttaaatcattattattaatttttggtaattttttaatataattagttggtactaaacctgctctaccatgaagacaaccacgtaaccaatcattattaatttcttcaacaataattattatatcatcctttttaaatgataaggtatcttcatcatcagatgataaatcatataatgcaattactttatcaggttttgaaatatcttcttcaagtaaatgagattgtaaaattgcagtattatcattattttgtaattgaggtgaagaagattgtatttgatttggagattgtgctgatattggcgctcgtatagatgaatctctcagtgataattcaattgctttctttaattctatatcatcatctgtagtagtagtaggattattattattagtagtagtagtagtagtagtaatagcatttttcccatcaattttaataattgcattattacataaatcagggtattttaattttaaattattgaatgtaattttaacaattgataaactttcatcattttggaaagattttgataatttataaaattcagttattaaagattctttaacacttaaatgaattaaattatcattaataattggtaataaattatcatttataaaggaagaattagcaatttgagctttcatcattgcaccacaattttcagctaaaaaatctaataaagtaattgatctaagtaaaatattagcatttgaagattgtaatttaacttttaataaacgtaaaacagattgaacattttctgaaggatttgaattaactaattcaactaaatctaataatgaaccataatcatcatcttgaagattaggagaagttatactatcaactagggattcaattgacattgtataaagtagaataataaataatattagctgagcattttagatcttaatctcatgatagtggcaaatcagaagaaatcaaaaaaattattaacggggcaacaaagaaaaataaaagatattacgtaatcagaaataaaataaaataaaatcgacccatcgactcatcgccctatactataaataaaaactataaataaataaataaattaatacctcaaaatttatcagtcatactaataataacaataacaataacaataacaataagaaaaagaaaaagaaaagacaataagacaataagacaataagaaaaagatagtttactattataattcattatctaaactaatctaattggtcagataagaatattccctattaattgattgtattaatattaactttattaattaatattaacgttattatattattattactgttattattacttattgcttgatctaaggatccttgtttaacagttacatactacattagtatatccccttttattcactttagtactatacgtttcttcttttatttatcttatatcaatcaatcaataaatatcaaatacaatacactataataatcaacttattaacaaatggaacaattatctccaccatcctctttttcctctcaattagattattcaaataacttattagatatgaaaaataatgacttcctatctttaactaataataatatgaataataataataataataataataataataacactccatctaatcataatattaatactattagtttattaaatactgaaattaaacccgttaaaatgattaaagatgaaattaatgctgaatgttcaaatatctcaaatgattcattagaaatctttaaaatgtttagtaataataataatttattaccaaagaatcaacgtatattaaatttatcttggagacttaatagtattaatagagttaaaaaattaaataataatactaataataataatcaaagtaataataataacattacaacaaaacctcctttaataaaacaaaaatctagacaagaatcattctcaaagaaacaatttaaaattaagaaagattctcataatcaaaaagaaagacaaaattcaattaaatcaaataaaaattcttcatcttcaacaactgaattcgattatattgaacatattagaagaatttcaaaagaagaatacggtatatcaaatccagattcttattcaacttctactaataataataataataataataataataacactaataatttattaaataattcaatatctccaggtagaaatttcaatattaatatctttagtgatgaaaatttaaattcatttaattcaattaattcaaattataatacccctgcttcaaatcttatatcatcttctttaccttcaaatttaaataataataaatcaataccttcaatttcatctttgaaaaaattacctgttaatttcgataaaattgataaaatgcaaaatcttattatgaatgatgattttaatattgatagttaccttaatttagaggaatcatcattaaataaattatcatttgaatctccaattaaaaaaaataaaactttaagtcatagtcataataattcagattataatttatcaaattatattaatacattagaaatttctttagataaaaatcaaaatcaaaattatccaactcctgtaactgtttcaacatctccaactttattacaatcttcttcatttaatgattcaattcaaaattcaatatcaaattcaatgaatcaagcaatgaatcaagctagaaatcaatcaatttctaattcaattaataataatattaataatattaataatattaataatccatcatctaaaaataattcaaattcaaatattccattaaatcattcaaataataatgttaatcaaccaatttgtgaaaattgttttacaacaacaactccactttggcgtaaaacaagtgaaaatagattattatgtaatgcttgtggattattctttaaattacatggagttataagacctccagttacaaataataataataataataataataatagcagtaataataacagtaataataataacaacaataccaatggacattcaataaaaaataatttaaagtataatccatcactttcaatctcaacttcattatcatcattatcatttactccaaatcataccaacttaaacaatcctgataccccaagtactataacaaataacaataataacaccaacaataataataataataataataccaacaataagataaatttagttgatgattcaagtgtacttgatactaatactaaaatcctcttttcatcaaatcttaatacattaaatacattaaataattttgatcaagattcaatgacaacattacttaataatcatatgtcaaattcattaccaagtaatgttaatttaagttcaagttttggtaaaaagagagcttataatacaatgattaaagaagagaatataattgaattaggtgaaccaatgattaattcagattctcatatgggtgaaactttagctgctgattgggattggttgaagtttgaattataattacaatattcttgttattattataatattattaatagacattttataaatatcacaacaatttttatatatcccctttttcaaatatttcaatagttttatgggttttcaaacacttttacttcttttaactcttttttaatgcttttacaactttattacacttctattctacttctctcttactttagtttaattcttagatttatatttccaattaaaataatccattgctaacactttactaaataaataataaataatgagatctttaccacaaccaagatattcaagaacaaggacaattcaaagaattttccgttcaattataaatttatttagtacaggttatatttcagattcttcagcatttgctcatcatacagttttagataaatcatctcataaaactaaaattcgtacatcaagaattacatggtaaaccaacgccaagaaatacaatgatgaataaattaagtaataaaattgtttctgaattaattgaagatgatgcaattatttctaatgttgtaagaaatgaaattgtagatttcagatcaaatgtaaatgttgatggtgttgcaattgtaaatgatgtcaatagatcatcaaagtttaggatttttcaaattttggaaaaatggtgaaaaatctgatttatcattaatgtaaagtttacttaataataaaattttataatatacccaaaccctagtatattcttatactcatggtaattaaccttaatttgtatataaatatacaactgttaaactaaattttttaatcatcaacatgaaaattaaaatttcaatcaaaactgctacgtgtttttttacacggaatttcttaatatctacaatctacaccttttctttatcaaatttatttattcaatcaaataaaataacaaacaaacaacgacaagataaatgagatcagcaattgcactctttttcttattttcaacttttttatcagttgttttatcagaatctgattattataaaattttaggtgttgatagaaatgctgatgaaaaggaaattaaacgtgcatatagagaattaagtaaaaaatttcatcctgataaaaatcctggtgatgaagaagctcaaaataaatatatggatataactaatgcctatgatgttttaatggattcagagaaaagaagtgtttatgatagatatggagaagatggtattaaaggtggtgcaggtaatggtggtggacaaggtcgtggtggcggtggtggatttcgtcatggtggcggtgatccgtttagtagtttctttggatttaatcaaggaccaccaagagctcaagatgtttcttcagaaattcaagttgatttagcagatttctttaatggtaaagatattgactttaatatttcattacgtgataattgtgataaatgtaaaggtactggatctagtgatggtttaaaacatccatgtgatagttgtggtggtagaggtagagtaatacaaagatttaatatgggtaatggtatgatacaaaaaattgaaacaacatgtccaaaatgtcaaggtagtggacaagtaattaaaaataaatgtaaaacttgtagaggtgaaggtgcttatgatcaaataaagaattttaatttacatgttaatccaggtactccaagaaatcatattgaaaaatttcatggtaaaggtccaactcaacctggaattattgcaggtgatttaaatattattttgaaggaaagtccaaattcaaatcttggttatagaagaagtggtaataatttatatagaactgaagttttaagtttaaaagaagcattatttggtgattgggaaagaaaaattagatttttcgatgaatataatccaacaattacaattaaaagaaataaatttcaaagtgttagtgacggtgaaattgaagttattaaaggtaaaggtatgccaatattgaatgggaatgatgaatatggtaacttatacattgagtatgtggttatattcccagtagctaataaaaaattattacaatcattacatgatgaactataaactttttgtataaaattagagataaaaattttaaaataactttataaactaatgaaaaacgatattcccataatacgaaagtttttagaattgagtttctcttgcagtacgaatttcagcaattgtgttctctctttgtggactttccacgaataaacttttaataagtgaaatcaattcatcagtttcaatttcatgtagtcttgcatcatagaaaatatctaaaatagatttcaaattattagataaaactaatctcacttgtcttagtttattgaatgtttgaatgttttcaaggtttatatttgagtaaccaatagttatttgttgagcagctggattggttatatcatctatgatatcagataatacctcagattcatatgatgatatatcttttcttgataaaatcaaatcacatatagtattaaatgaattaaaaacaactgtgacaaaagtatctaatatcatttgagtattcatttcaaataaattattcaactccgctttaatttcattgaattgagaatcatatcttattaaaaattccattttataagtattcaaattatcatcactatctaaatcattatcttcccaaatagtttccctataatcatcaattacgtttagtatcaaagtggtgtatgaatttgtaaatttttcaataaatgaagaattcattttgaagcaagatgttaaatcaattgtgtatttagtataacattcttctaaaattttattgtaatcattgtaaaaaagaatttcgtttttgtaagttgatttaatctttgatgaaagcatcatatagtatgagatacataactttttaaacccatgtttaaataaattatgtgtctccataatttgttcattacctacatgcaagttcttcaaatcatcatagtttttcatatatgtgtcaaatattttcatagcttccatcaccaatttagaatatttataaacaggagcattatattgattctttttatcagttttaacaaaattctgcttgattgaagcgttacttttcaatgactttaaatcgtcttcaccaccccatgcatcccacccatcctcatcttcttccttttgtactggtggcgcttgtatttgtgcatctacttcctcatctgagccccaagcatcatcattccatccatcatcttcgtcattccacccatctgattttgtatcagtgttctctttcttgacctgaacttcagtctcaaccttgttttcaccatcactaccccaattttcattccaatcttcattattccaatcctcgttttgagttaattgttccggttgttttgtctgtactgccgcaacatcatcatcaaattctaatgctttggtgattagattttcattttttaataaatcattatattgatcatctaacaaattcatcacatattcttttatattgtcaatattcacttcaactaaattattaacccatgaattagttaaatcatcaatccaaaattctagttcacaaaacccatccttagaccagtatttctctgataaaagtctggatatctcgtataatctagcaataactgaaactttactatctttcccatttccatactcatcgtagttaattttgtctataattaagggataaacattttctttttcaaatattttacttttcaatttagttagtatgtttttacctataagagatctatagtttccaaaatcttttatattttgagaaaacaatgctatttcattgaaaaatagtataatcttttcaattgagttagcaaaatgtataatctccacttcttgctccaagaaggaaagtttgaaagagccttgatcattttcaattaccactttgtaccctttatcaagtttatcaaaaacttttataatccaatcgttaaacattttattcaactcaaaaacttcatttaatgaggtatccaaaaggtctttacaagatgataaaaacttctcgtatggtaatccatctgagttgaccttattaaatgaaatttccaattcttcatttatatacaaatactcatgaattttttcttttgacatattggttacatcatttttgaaagaatgaagtttattcttcaactcctttaatatcttaatattgtcagcatcgcatgttgaagagagacttttatgtaaattgtaaattttggaacgtaactttatgaaaactgatgatttgtgttcaaattgattttgttgctgaaattcggtgatcaattcattgattattgataactgattgcacacttcaatcacctcagattgatcatttctatttaattccccaaaaccattggttttcttactactaagagttcctttttcatgatttgtgtttgatagatctaaatcatgttgtaattgtttaacattgtaattctcaagataagactctagtttttggtctatttcatcaatttggaattgaatctgttccaattttttcccgtgtatctcttgagctactgacattatcattcaacttggatgttgggtggattttccaaagaaaaaagtacacattccttaaagattccattaacattgctgtcagtcaaatttcaaattttgatctccaggtcgctgccccttatactttactaccccctgggagcttcttgtacaatgtttcgacgtctttagtaaacaataataaaacaataataatatacagtaatacatagaaggaactatcctattataaatctaaataactaaatatttgttcatgataagttcagcttgtttaaatttttattgatattgtaaatcatgtacaaattgtacgcagcttctttcttgagatcataggttggatcatcaacttcaatttccaaaacattttcataaaatccaattgctaaatgatctaaaccgattaatgagaaactacgtccaatattgtaaaatgcttccattttgttgtatggatcattttggtctttagtttggatatattcgaaaaggtatgtcaaaccttgtaaaatttgaaaattggtattaaatgtttttctttgaattgatctgtgtaaattggccaatgcgagtaaaaagagtaagtctggattgtttgggtatgtcttatacaactttaacaaataaattaaagttgaataatatgacttgttggtgaaaagatatgatgcatagacataattgacaagaaaatgatcctttgttgtatcaacatttgttttggtgattgtagcttttcctgtgatgttttctttagattcgtctttcaatgaatcaaaagctttaacttgacgcaacatgaatttttgtgatggtggatctgcatataaacattccatttgaacagttggaactatactagcaaggtacaatctgaatgagtcaattgaaaattgataatcattcataatatttctggtttgcgtcatgataacagatgcatcttttgtcatgacaccaattgataaacctactaattgtgtagttaactcattctctttaaaaacattgacttgtttgatgatatcttgaatcataaatgcactctcaccatctctctcaaattctgcaatcaagagggcatatcgtacaaaaaggacataccaatcagaatatttcaatcctttaaattcatcttcaggacatgcttcactgaaacactttttggaaaggatgatttcattttgtagatatttcattcttaagattttttgatcaataccaagcttagcggttctcaaacgtaacttgatatgaaactttttagctttatcagaagagaaaaaccatctatacattgcaaaaatttcaattaaatcagaagctgtttcaatccaaacactgacaagagttttcaaagaactcttttcctttttatctaacaaatctttgccttgtaaaatatcaatttgcgataaaatcttcatacatctattgaagagctttccaactctaatatcagatttcatggacattgtattcaattcatcttcattatatgaaacgtttttcttcttcttctttttacttggaccatcttcaataattgcttgtgtacgttcaatatcattttcttcttcttcttcttcttcttcatctctgatgcctacttcttcaagtttcttttgtatttcactttccatttcagttaagctcggtttatcctgtactttagctttttccttctttctctccttcttggcttcattataaagtttatcagctgcttcaatatcattcaaataaaaataacattcagcaagtgcaactttcaattcgacattatctttatcaaattcaagaagtctaacgtaagtttctttagcactctcaaaatcttctgtctctcttaaacatttggcaattgtgataactaattctgaagtattatattcctcataataggataatggtattaaaaagtctagagcttctttgaataatgcaaaactctctaattccataccaactttaaaatataaatcaggagcttcctcaattggttgttctgccaaaataggaaaaatgttttattgcttcttcttcattcttattgttaagtctgaaaatacctaattgaacacgaatatcgattggtaaggaataatctaatgatccttccttaggtattattttttggaactttggatgatcaaatcttctttcatcaaattctacatcaatattcggattttcatcccaaaacacttgcttttctctttcttgaatccatcttgatgtttgtcttaatgattttatacctaaactccaagcagcttttagatgcatataattctgataaaatgttaagttcagaccaatcaaaagtgatgttatttaaagtaaccatttctcccttatcaactagtgttctaaatgtcatattatcttctaagatttttgaatatagtgatatcgcatcattaactctattttcttcaacataaactttggctaattcacgtacaattctagcatcatgaggtaatactgatctgagttttaataaatcagaggatgctcttttaaatttaccaacctctctataaagacaagctcttgcaaaaatggcatcgtaatctttaccacgagatgcatggattgcacgtctgtaacaatacaaagcttgtttcaaatgtcctaattcaactgataattcggcaattgatttccagaattcaccatcattaggattcaaatgagcagctaaaagccaaatattagaacatttattcaattcatttttcattctatatatttcacctaatgttttataagcactgaaattatttttatccaatttaataacctctgaatataatttcaatgcattatctaaatcattagtaacaaaggcttcatttgccttagataatgctattttgatttcaggatccagttcagtacgtctaatttttcttctcaatgcagccaaaccaccctttttacgtggtttctttgtggttttcactttaaaattcctagcttccctaagggcattcctgaataaaaattcatcatcggaatcgttatcactaatattttcatcttcaacttctgattcatcaaatcctaaatctgctaatgttttatatctatctgctttactattagcagaatcttcataatcagaaatatcggaatcattatcttctctaacatcatcaacaaaatctgaatcatctaattcattatcattattgacaatttcatctgcatcatctgagaattctaatgcttcttcgttatattcatcattagcaagtaattgacgcaattcatcttttgaaaaatgatctaaatcaagatccatttgatttgtctccctatctgtaggttctgtcatttcaattagtttacctgagaagttacaaatgctttcacctcaaaacaggcctgtctatacaatagattcaccaaaagctaagcaaaacgtagaaggtgtaactccagtaaacaagacttagtaacaaaaaaacgctgtcgtgagttcgagttctttatcgctgcaaattgtagacatgaaaatttcaaagattcctagcacattgtcgatccaacggcaaattctttatcttttctgtacattttattagattaagttcaacaaaagaagattgatataatacaattgaatatggtaagtatggaaattggattactcagcattttgaacaattactaacatttaaatttctttgcaaacagttttctggctttcctgaattttcgggacataatccgtcatcatttttcccacaaatggttcaaattccacaaacatttgaagaacatttcagatgttacccaataacaatgatgaaagatgcaagtaataagagtatctctaattatggaggtaaaatctttttaccacaatctgcattacataaacttacaatgctgaatatcagataccctatgcttttcaaattatcaagtacgaacacaggcaaatatactcatagtggtgttttggaattcactgcagatgagggtagatgttatttaccggaatggatgatgaacactttagaaatcagtgctggtgcagttattagaattgaaacaactgatttaccacaaggtaattttgtcaaacttgaaccacaatctactgattttcttgaaatttctgatcccaaggcagttttagaaaatgcattaagaaattttactacattaacagtcaatgatataattgagttgaattataataatcatatttataaaattaagattttagagatcaaaccggaatcttcaactcatggtatttgtgttattgaaactgatttagtaactgattttgcaacaccggtaggatatgtcgagccagactatgagaaattaaaggaagaaaatgctaaaaggaaaatagaagaggcattaaatgcaccatcattgaagggtaaaggtacgatggcaaggcaaatcaactatagtagtatgttatctaatgttacaaatgaagctattaataaatttagtggtagtggtgctaaattatctggtaagaaaatacaagaagagattaaacctgttgaagaggtaaagagtgaagaaattgatctatcgggtccaccaaaaccattacaattacctgaaggatatttattttttgggttccccgtggttccatatgtagatgaatttgaggaggctgaaagaaagcaaaaggaggaagacgaaggtaagaagaaaatagttttccaaggacaaggacaaaatcttagaagtacgaagaagaggaaagataaaagtaaagcacatacccctgtaaagaataaagttagatcgccagatgctataataatcgattctgattgattaatgtttctacatatatatggttctataatatgtgtgtataaaagctaaaagagttcaacatgggaaacataaattatatgccttttattttaaatgctatgtaatctaaagaacctaaactttccaaatttccaacagattttaaagcttcatcataatcaaccaatgaaacttctcttaaaagacttgaacttttcctcaaattaagagaatcccaaatatcattagtaattgaataatcaacatttgaagctaatgctgcaccaattggtgatttaaatgcaacataagcataatgataatgatctgaatccttattttcatcaaatgcattaacatacttaacaggaccaaaaactgacattagttgctcaattatgtcttcaaaatcattaatatctattttatttttccatttaacttgtacaattttcgggaaaattgatgattttttcgttatatcatatgatgattcctttcttataggcttttgttcaacaattacctttttttttggtataatcatcaaaccattgagatagttgtgatattttttgatcccttgttagttttgtaattttgtcagatttatacaaatcttccttctttttcaaatcagatttaaatttagatacatctggattgattgatggtgagtttaaagttgatttgaatttcccagttatgtatgtatcatattcttcacgtaatgaaggatcattaagaattttataactaatactaacttctctaaatttttcatcaatatcaattgaactatcattcttatcaggatgatataataatgctttttccctgaatgctttacgcaattcactcaaattagatgttgattttatccctagtatttcataagcatttgaattacgtgataatagccagtcatagtctttcttgagagatctatccattaaatgttgaaagttcctaagagttataacaatcatcagaaaaaaccctctctttgaaaaaacatgtagataatcttttcctttataaattgaataatagtgagaaattactttttcactttattaccatgttcttctttttagtctttttgctttgattcttgaaagtagagctgcccaatcacatgtaagtatgtgtattggtaataacgatggatacatgcatagatgtattggtaccatcgggagatgttcaaagcatcaaatgtagttaattttacaatatcaagacactaataaataatttaaattgttaatgatgaaaatttttactcagctcactctgatctgtaatgaagataaacaacctgtttccaacattcatcaattttactgattacaatttaaatttattattagtgttttataaaaatgtagtttagtatttgttagtatatcctgtagtatctcgaactctccttttgtaccacttaaacctatgtttaacaacaacttcttgaatgtttatcagagcaaatatactttccctactctttttttttcaaaaatttgatttttcattctgttttttggaaataatatgttaaatatatgagtcaaaactttactcttcaaaacatcaaaaatattgaaccttgcaaagagaataaaatgaatatttacacaactttaaaaaatagtttttcaataattctcgcttacgtaatcacttacaataattacagagataatatcatagtagcaacaaaacaatcgcgggttaatggtctagtggtatgattcctgctttgggtgcaggaggccctgggttcaattcccagttgaccccgattattttttaattttttatttttcttagagttataaataaaatgaaaattagtccccttagttatctaaaaaaagtaaattaaataaggggctcatcaccagtattttaataaaccattaatgtcattaacagattattattttatttttattattaactaccacgtgtgtatcaaataaggcttatcactctatatatgtcttctaataactcatctatcacaacgtgtgtagcattgtatcagtatttaactatttaactatttaactatttaagtattataccatctgctctttagtacttaagatgtttataaccgttgtctgcaaatatctcttcaacttttcagtataatctatcttaattcttttatttattctcttaattttttgtctacctttaaaaaacacaaaccaatttaaataataatggataacgcacacgaacctatgtcatacggtgaacaatggaaatatgatttcacacctaagggaattagagaaaatattggttcaattattccatctggtaaagatttaaaagaacaaggtgttgtttgttataatgttttagttaaaggtccatattatcttggtaaattctgtttcagtaaaggaaattaggtttactgtttaatttataacaaatacttagttttactccataaatataacttttttcacttttagttcttttctttctctttttatattatagttctataattacaatcaacaaattcaataattaaatactgtatctagattcatctatacattgtataatctgttgtatcttattatcgtttaagacatttagtataagatgattacctaatggaagaagtcaaatttcaattttcatagaattaacattaagataagactataatgaatattaaccttaacatctttctctctttatagtagagtaaataccacaaagtaaactacacagtgatccgatgacaataaggctatgtactatgtagtcattccctcccaacattgtaacacacagacacaatgtatcactgataatagtaaaattagttaattaaacatagtgacttgacccacttagatccgcgtatataataataggataatttattatctattatgattaatcacgtatagtataaaatcaattgatttcccatattgtgatatccttttaataagttatgtgtcttttttttgttcatctctttatttggtttaacgtgcaactaacgcgttcataattatataaatagatataataaataataaataataaataataaatactcataatggcagatgttgttttaggttctcaatggggtgatgaaggtaagggtaaattagttgatttactttgtgataatattgaagtttgtgctagatgtcaaggtggtaataatgcaggtcatacaattgttgttggtaaaacaaaatatgatttccatatgttaccatcaggtttagttaatccaaattgtcttaatttagttggttcaggtgtcgttgttcatataccttcattctttgatgaattagaaaaaattgaaaatcaaggtttaaaatgtagtgatagattattcctttcatcaagagctcacttagtttttgatttccatcaaagagttgataaattaagagaagctgaattatcaggtaataaaaaatcaattggtacaacaggtaaaggtattggaccaacttattcaacaaaagcttcaagatcaggtattagagttcatcatttagttagtaatgaacctggagcttgggaagaatttgaaactaaattaagaagattatttgcaacaagacaaaaaagatatggtgaatttgaatataatgttgaagatgaattaaatagatataaaattttaaaggaaaaaatttcaccatttgttgttgattcagttgaatttatgcataaagcattaaaggagaataaaaaaattttagttgaaggtgcaaatgctttaatgttagatttagattttggtacttatccatatgttacatcatcaaatacaggtattggaggtgttttaacaggtttaggtattccaccaaaatcaattaaaaatatttatggtgttgttaaagcatatacaacaagagttggtgaaggtccattcccaacagaacaattaaatgaagttggtgaaaaattacaagatattggatttgaatttggcgttacgacgggtagaaagagaagatgtggttggttagatttagttgttttaaaatattctacatggattaatggttatacatcattaaatattacaaaattagatgttttagatacttttaaggaaattaaagttgcaattgattataaatataatggtgaaattttaaaatcattccctgaatgtttaaatgttttaggtaaagttgaagttgtttataaaacattccaaggttgggaagaagatattacacaaattaaaacatatgaagaattacctgaaaatgctaaaatttatcttaaatttattgaagattatttagaggtaccaattcaatgggttggtacaggtccagctagagaaagtatgttagaaaagagtacttaatagttatattgtttatagttaagtatatagtatagtaaatattacgtaataataataagataaaagtgtggcttcaccacagtcacgtggcacaacgcaataatttttattagaataaacactaaataaacattgctgtattaatagagtatatcacattacaatagcaaaaccggtaattatctattatctattataataccaaagtgacaataattaaacaatacggcaacagtgagattgtattaaactctttaataactggaaaattaaatttttttttgtcagtttgagccatcaacaacagtaactgcaaaactgtggttcatgacttctatctcaactttctatttctatataattcttaaataccttattgaagtacctgatatacacattcattgaatattcacatgtttgatccattgtgtgttgtttgttttaattcattattattgattatcatataacacagtatatttaataagatacgatacgatataggataggatactataggggacatgtcgtttggtaatatagaatttaataataataacaactataataacgataaggataataataataatgacaaccacaataataataataatgataatatacgatataataataattcaacatcatcaaaacaaaaggaattatttaggatattaaattctcaaaaacctgaattaagtaataacatatcattaacaaatcaattaaataattcatcaaatataactgatgaagatttagcatttttaaaagctgcaaatgaagttattaaattaaatgaaagtaaagttgatccaacaattagagatattttaaatagattacaatattcaaattctccacatggtggattaccaatttcaatggaatatatgaaatcaattggtgaaagtccaattgattcattttcatctactaatgataatattaatacaatttcaaataataatattagtaatgataatgataacaataataataataataataataatcaagatttacaatcaaaaatgtcattattatcaacagatgatttatacccaaataactttattcaaaattctccaactaattcaattatacctccatttactgaaaatccccttagacatacaccaactaatttagatttcccacaattttcattagatatttttaaaactgcaaatgattttgttaataatcaaaatcaattatctgtacaaaatttatcatttaatttattattacaacaaagacaaagacaaaattatgatcacgatgatgtgcataatgaagataatgatcatgataaaactgaaggatattactcagaagatgaagatgatgaagatgaagatgaagatgatgaagaaggggatgatgaagatgatgagggtatagaatttgatgattcagatatggaagaagatggagaaaatcaaaattatagaaatgaaattgataatattcctaataatattcaacaaccaccaataacaattacatccaaagttaataaaaattatcaaaagtctggcactagagataaacgaaataattcaataaccaatactaataataatactaataatactactaataacaaagcaaaatcacataatgatgatgaagttagaaacttcaaatgtggtaattgtggcataacatttaagagatcatcagatttgaaaagacatgaaaaaattcatcttaaagttccaccaaatatttgtccattatgtcataaaggttttgcacgtagagatgcattgaaaagacatgttaatacattaacatgtaaaagaaatagggagagattactgaaagaactggaagctagaggtgatactcttcaagagatgaattaattgattaatggcattgtataatacagtatataaccaacatccgtaccccctcacacagtaaataacttgaaaatttcatcacctcgatttatttgacaaatttcacttttttcgacgttttggtgaatttcattagtgacatattcttgttaatcctgtaacttcttctaaattctttcttaatcaactaaacagtctattgtaaatatgcctattgatccagaaaagttagctaaattaaagcaatcatcagctaagaaagttggtggtcaaagagttaaggcaaagaaagttaataagtcatcagaaggtgatgatactaaaattcaagctgcattacaaaaatttaatccaacaactttaactgatgttgcagaagcaaatttctttagagatgatggtacagttttacattttaatagagttggtgttcaagcttgtgctgcaaataatacttatgcagttacaggttttgcacaagaaaagcaaattactgaattattaccaggtattttgactcaattaggttcagaaaatttagaattattacaaaaacttgctcaacaatttcaacaaaatcctgaaagtttagctcaattacaaaatcaagcttcaaatggtgcaaaggatgaagatatcccagaattagttgaaggtgaaacttttgatgatgttgaatagattatttgatttaaatttataatatttctttataacttaaataaattaaattaaattaaattaaaattaattatataatacatgtaataaaattaataaatgcacatataaattacaatttacattactatgttttttttaattgattaattgattattattaaagttatacattattaattgtttgattattactaaagaaaattaaaaaaaaaaatctttttatcaagaatgtgttgcatacattcttataataaaaagtaaccagctgcaagtgctgcacctgcaactgcattagcaccattaactttaatagctgcaccttcataagttgaaaatgatggaccacctggataagttggagaaactggtgtaaatggagaaactggagtagttggagcacctggaacaactggtgaaactggagtacctggaacaacaggagtagttacattatgatatggaccagttggataaactggtgtaacaattggtgtagtttcattttggtatggaacagttggttgaattggtggaacaacaggatttgtacttgttgtaatagttgtattatgataaattggaacatctggagtagtttcaggaattggagttggatatgttttagttgatgaatcacaatcatcagtttcagttgttgtctcagttgaataataagttgatggagctggtggagctggatgtgttttagttgatgaatcacaatcatcagtttcagttgttgtttcagttgaataataagttgatggagctggtggagttggaattggttctgtttttggtggtggaacatatgttgatttagttgatgaatcacaatcatcagtttcagtttcagtagttgtttcagttgatggaactggagttggaacatatggtgtagtttcttcagtagttgaagttgtcttggttaatggaatcacaatcagtatcaacggtttctgaataacctgctgatgcaactgatgcagttaaaatagtagtgagtgtaataagagtgaacttcattgttaaacttgatttgatttgtattgaattaaagcgaatgtctttatttaataaatgaaataactaaaattaaagtaaataaaaacgaatagaaataacagaaagaaaggagtgaatgatagttgaaaatagtttgtttaaaaattatgacattcttgcttcaatttatactaatttctaacattacagtacaaactacattacagaaaatgttcaatgaaatatacaagtacaaataatagcatgaatagataagttttctgccagaatgacgtataaagaacagaaaacatgcctaatcgggtaatccttcctctcctttttgagaaattttcatgctttcaaaacagaacattttttattatggtacagtctactatacaattttgctttttctgctaccagaatggtacggtttcaattcagctatcctgcaggtttatatgtttcataataatttaattataaactgttattaaaaaaaattgcataaaaagaaattgtgtaaaagaagtaataagtaaaagatgagtgattgtaaagaacagtaaagaacgaaaagaaaacatcattaatggttaaaacttatatattgtaaaatgcatgcaaaagtagtatactcaatgtgtgtatgatacttattttattgtattatttctagggtttagttattgagttttattatttttagcattaacattattgtcattgttattgttattattaataatgaatttttaaatcttctaattaattcataatagttaatgaaataattgttaaaacaatgaattttggagtccatcgatgaacataaatctaaaaatgtatcaacacattttataataagtttatcatttttaactttatcatcatcaaataatcctaactgtttaaaatgtaataacataaaaattgataaaatgatacattgattaactaaatcactaccatcaaacaaatcgtctcttgatttaattaattcgtaaaaatctttcatatatttcaaaaaatcattacatttattcttaaattctatttgaccctttaaaaacaaattttttaacatatatcttcttagaatcattaatttagcaaaataatagaaaactttaacagtaaatccctgatgaaatttcatttgttaaatatttccaatctgaataaacaccatctaattctttgattgaattttcaacattttcagggaataataatgaattatataatgataatatcatacacaattgatgcaacaattattgcatcaaatgaatttgcttcaggtaaatctaaaatatcacgacattgatcaagtctaatttcatcaacaatacatggcctacccgataaaatacaattaatcaaatgagaaattgttaaatgattccaaattctatattgatgaattttttcatttgatttaacacttttaactaataaattaattgacatttcacgtgtcatgaaatgaattaaaccataagatgaaatccaccaagaatcaaaataaatatgtctatatgataatgagggtgaataatgtgttaataaaatacatgtttgtagaaattctttattttgtggtacttcataaatacttaatgataataattgatgaatactttgtaaaatatctaattctaagttttcattcatatttgataatcgttgataacgtaaaccaaataaaactaatgtacaaaataataatggtgagctaattctaatcgaatcaaaccatgttttaaaatcttcttgataaaatgaaatccatttaccacaatgtaaaactgcgatttcaattaaactataacatgtatcataatctaataattttctattaatcaaatcatatctttcttgaattgaaattaacaccatatctttagttatatcaaaaccaatttcttttgaaaatggtaaacctaattgtgttgatgtattaataatatctacatatggtgcattaaggaaaaaaaattcgtcattttcatgaatattatttggattcttacttacagtagagattgtatttgaattatttgataatgtattcaaatttgataacttatttgaagtttgcaaataaggacgagctaatggagcattaattgaaggttgtaaaacaaatggaggtttcatttcattactgatagctaatggtaattttgaaattgtattagggtggataaaatttattcatgtgcatatgcatttgcatactcatattcatatttggattaatagtagtgttcatattattgttcatattattgttcatattattgttcatattattgttcatattagatggaatatttggattcatatttggattcatactttggatttatatttggattcatatttggatttcatacttggattcatatttgggattaaaattcatattcatattcatatgcatattaggatttaggtttggatgcatactagatattaggattttgaaatgataaatctagtgtagttgaaggtttcctattagccctatttgttgataagggcacagaattgaaatcaacaaatgaattttgagcggggattaaggcaccactattaacggtattattattgttattattattgttattatattattaagatctttttctaccagtatactaataattgaagttaatttatcaattttagaattaataattgctaaagcatttgaatctaaattattatcagttggagaaattcgaagttgaaattgaatttgacattgaattagaggatggatcaaaattataatctgatttatttgttgaagcagaatcaattgttgaaattggtgtattatcttgaagtcctaacatactattatttgcagttaaagattttcttttctttttcttttgttgaatttgagatttttgctctaaaacttcatcccttgttgcaatatttgcagatttttggaaacttgaaaggaccggtacacttgaatgttcacttagggaacattttaatgacaaattttcacatctaaaacaatttgaaccattttcaatataattacaccgagttttggcttttctacattgatcacaggcgactgaagctctttgaaagttatatttccttttatttttaggtgcagatgaaccattatcatttggaggatttagttcactatttgaagacattattttattcaattctttgtattattctctattattctctattctattattctatttaattctaatttatgatctatttgatttattatattattatattagctctattatacaatattcttatacttttgttttgtatttatttttttaattgttaaccaggatatatttaatttaatttgttgaaatttacttcaaggaaatgaattccgttgttatattattataaataataaattaagaacttatttataatattggaaacttgtgtgtgtgtttttagaaaatttgaaactgaacaggattttttatctcctcaacctttttcaacagttaacgatgcactttaaattaccttgaagagagagataaaaaagaaataaggaatcaaactaagaaaaaaaaagtaaagtaaatcgggaagaaaatacaacattaccaggaaatgctcatcttgatggcaaaataagactttttgctttatcaccaacatttatcttttgttaaggggggttcttactggtttctttccactatttcctttctttttagtgaagctcttactgtatagacagtacctatgtgtttatctacactatacactcatttgatgactatatcatctcctatatgatactatagagggtatataagctatagtcatgcaatcaatgcagacgcatcgaccgatgaaatgccggtgtcttcccaatgtggtaataattctaaagattaaaaattttttttccattaaaatactttaaaacttctcttaaatttatatatatacttgtaattatattattacatcgattacttactttaaacaatgagtgaaagacctgttaagaaaagtaagactcatgagtctattgcagaacaagaagctgaaaaatttgaagctgaattgaaggcacatcctcataaaaagattgataataaattagaatttcatgatggtggtgaatttgatattaataaaagacatttaacaactgctgattatggtaataaattaggtgaaggtactaataatccatttactggtaatgaatttagtgataaatactttgatatattgaaaattcgtaaagaattaccaattcatcaacaacgtaaagaatttcttgaaattttccaaaaaactcaaattatggttttagttggtgaaactggctcaggtaagacaactcaagttccacaatttgttttatatgatgatatgccacatttagttggtaaacaagttgcatgtactcaacctcgacgtgtcgctgcaatgtcagttgctgccagagttgcagatgaaatggatgttaaattagatgaagaagttggttataatattagatttgaaaatatgacaagtaataaaactatacttaaatatatgactgatggtatgttattaagagaggcaatggaagatcatgaattaagtaaatattcttgtattatattagatgaagctcatgaacgtacattagcaactgatattttaatgggtttattgaagcaattaagtattagaagacctgatttaaaaatcattattatgtctgctacattagatgcagaaaaattccaaaattatttccataatgcaccattactagcagtacctggtagaacttatccagttgaaatttattatacaaaagaatttcaaagagattatttagatgctgcaattagaactgttttacaaattcatgcaactgaagatgaaggtgatatattattatttttaacaggtgaagaagaaattgaggatgcagtacgtaaaatttcacttgaaggtgatcaattagttagagatgaaggatgtggaccaattaaagtttatccattatatggttcattaccaccacatcaacagcaaaaaatttttgaacctgcaccacctgcattaactaaaggtggtaaacctggacgtaaagttattgtttcaactaatattgcagaaacttctcttacaattgatggtatagtttatgttgttgatccaggtttttctaaacaaaaagtttataatccaagaattagagttgaaagtttattagttagtccaatttcaaaagcatcagcacaacaaagagctggtagagctggtagaactagaccaggtaaatgttttagattatatactgaggaagcatttgaaaaagaattaattgaacaatcatatccagaagttttaagatctaatttatctaatacagttttagaattaaagaaattaggtattgatgatttagttcattttgattttatggatccaccagcacctgaaacaatgatgagagcattagaggaattaaattatttagattgtattgataatgaaggttcattaacatcattaggtagattagcaagtgttttcccattagatccaatgttagcagttttattaattggtagtccaaaatttaaatgtagtgaagaaattttaacagttgtttcaatgttatcagtaccaaatgttttcattagaccaaatggtgaaggtgcaaagagagcagcagatgaatgtaaaaaattattttcacatagtgaaggagatcatttaacattattaaatgtttatcattcatttgagagtgaagaagcatattcaattggacaacgtaaatggtgtattaataatttccttaattatagatcattaaaatctgcacaaagtgttaggaaacaattaagaagaatgatggaaagtttagatattgaattaattgaaggtaattatgataattataatgaatattatgataatatacgtaaggcaatggcaaatggatttttcatgcaagttgctaaaaagaagagtacaggtaaaggatatattacaattaaggatagtcaagatgttttattacatccaagtacagttttaacaggtaatgaagaatgggttatttataatgaatttgttttaacaagtaagaattatatacgtacagttagtagtgtacgtattgattggttagttaaatttgcacctgattattttaaagttgaaaatttccaatcagaggatgttaaatttagtttaaatagattttataaaaagtagtattatatattatttaatattatttatatttatattatatacttatttatacacacataaaaattaattgattaaattaaattaagctgattaagcaaattcacctaatgataaaactttttcaatacctctaacaacggttggagtatcagggaaggcaaaatcttctaaagttttagcataaggagttgggacttcacaaccagtaactctttcaattggagcatctaaataatcgaaagcttcagattccataacttgagcacaaatttcggaaccaacaccacattgagggaaaccagcttcaacggttattgcatgattagtctttttaattgaattaaagattgtatctaaatctaaaggtttaattgatcttaaattaacgacttcaacatttaaattatatttttctttaataattttagcagcttcaatacagaaagttaaatttcttgaatgagagaaaactgatactgcatcaccttcaatttcaattttagccttaccaattggtaaaacataatcaggagataaaatttcatcattaacagggaatgattcaccatataataattcattttctaagaaaacaacaggatttggatctctaattgcagcctttaataaacctttagcatcttcagcggaataaggagataaaacttttaaacctggaattgcagaataccaaggagcataatcttgagaatgttgagcagcgacaccggcagctgcaccatttggaccacggaaagtaatattaacaggcattttaccaccagacatataataagttttagcagcagaattaataatttgatcaattgattgcattgcaaaattaaaagtcataaattcacagacaggttttaaaccagagaaagctgcacctacacatataccagtaaaacccatttcagtaattggagtatcaataattctctttggaccgaatttatctaataaacctcttgaaactttataagcaccattatattgagcaacttcttcacccataaggaagacatcattatctctatctaattcttcttgaagagctaaattcagagcatctctaacggtcattacttgaacaccattttcaacacgagttaattcatgagaaattctagcagttgatgcaaataaacggaaagtgtttaaacggaacatgactctgtctattgcttactttaagatgataaacttgaaagaaaggaaacaaagttaaagatcctataagaaataaataaataatatacagactctttaatacaaaattaaatattaaacctctcctccacctatatttaataaacgggatactataatccgcgtattaagaaattatttctattgtgtattggaggagtttgttattatactttatactattccattataagagaggcaaattcatcccatgatagagcaccgtctccatcattatcgaattcatcaatcatggcaataagttcagtctctgttatactttcacctaattcattggcaactctacgtaaatctccaactgttaatgtatctctacctcctgtaaataattgaaatgctcttcgtacttcctcctttggatctcttgataatgttaatgatgctgctcctctgaaaaatgtatcatatgatacagtattagatgtattgtttgtactactattactactacttacactattattattgatattattatcaatattatttataaaatgttgttgaatagtttcacgtgatgaatcaagtcctaatgctctcaatgcagctcttaattcatgtttatctaataatccatcattatctaaatcaaataatgtaaatgcttctcgtatttcttgcttttgttcctgtaataattccctacgttcactcattgtattgattatattagtgatattatattgattatattgatgatattatactatagtatatatgatatgtctatacttataatataatgatatactaacctgtacaatgatatacaaataaaataaaataaacaaacattagtggttaatatagaataacgaaaaaataatataaatagagtgcgttttccactttatatacttttatcctcctgttgaactgttatttagtatggtacacttcttgtatagtacaactcagtatggtactatcactaataccattaggtgagagcaccatgttgagatatactatataaggaatgcatttctaaaacaaataatcttttctttttctgatgtatatatatttactgtataataaactttatatacgtttataaaatatttaattgattatacaatacactatttcaaagctcatgaatcaagttatcctaaaccaatactgaataatgaaaatgaaagataggatgtttcctcatatatattccgattgaattgatatcgttactcttcgatctttaagggaaacagagattcatttctaacattaccaccctacaatggttcatctaatttgtatattttaaaacattgtagaccgtcctaaaaatatacctatctatctctaatatcactggacaattactattgtatacactgctatagtccttaattctttctcttgttaattggccatttcctggctaaatcaatgtcccctctaggataatatatctccaatactcctaatattaaataatcaacaacaatacataaaacatataatatacctgcccaactaccaacattataatatttaattaatctatctccaattgtacccttcctttgattcattactttatcataaacaatctcagttcttaatgctacatccccccatccatacataccaattatttcattatggaaagtacttgtatcaacttccttattttgtaatttcttaattgcttcattaactgcttcaactaatgaatcctcttcaggtttggcgaaaaactgtcattttatttggtaaaacttcaggtatacctccaacattagttgtaacaactaataatccacaacttgcagcttcaactaaaactgttccaaatgcttcagttaatgatggatgtaaataaatttgtcccttaaccattacatctctaacttgttcatgtctaatactaccaattaatttaactctttcttgtaattgatacatttcaatcatttgttctaaatcaataaatttaggtccatctcctgcaattaaaaatttaacattattataattttgacaaattctaggtataattgcaattaataaatcacatcccttattagggaataatcttgatataacaactattgttatctcctttaatgataatttattctttaatggttggaaattttcatgaataacagcatttggtataacactaacattttcaggtttaattgatgctctaataactgtattttctttacatgtatgtgaaacacatataacatgtccaatatctttcagtgtaaattttaataatttattatgtataattgatgcaacatctgcaaatccaaataatgaatgatcagtgaaaatagtctttaatcccattgtattaccatgaattaatccttcatgacacattgatgaacaactaccatgtccatgaacaatctcaatttgttcccttataaatatattccttaaaatggggaatgctgaaaacactgtaggatgtgtcgattgtctatgaaatactccatatggtatataataaacttttaatccatttgttaatattctaacacctcttctatctccatatccatgtgttataattacaacactatgtttacgtttaattaattcctgtgctaaatgatatatatgaagttcaacacctccaggttgtggataaaagaaatcactgactaatgctatattatatggcatatattgtcctatatcaataagagactctcttctaaagactcttccatgaaaatcattaacgttacaaattcatcttcattttcaactcatcgtacaataaataaacacaacgccaccactacttcttcttcttcgttttcattattcaaatgtcttatacccctttaaatgacctgcctttggacctaccaccggcttatgaaccatctccacaactacagtttgatatagaggatccaataagccaagaaccattaacttttcgtcaacatgcatcaaatgcagctaaatcatttaataaacgtataattcaaccaattaataatgcattagatccaatctatcaattatattgttattcaaatgctaaatttgaatattatatatctaaagttggtaatccattgataattaaaaggttcatgtatatattctttttcgcaattatattatatattgcaacattaacaggtttatcatcagaagggatggttggtttacactcagattttacagatcccttaaaattatccaattttattgaaatgtcattagatcctaaaagattagaggaaaatttacaatatttttcttcaatgcctcatttaagtggcacttcaggtgatttagcattaggtgaatatattgaaaaatttatatcaaagagtaaattggaattaaatcctgatgttatatttgaagcttttacaaattatccaaataaaccaactgctcagcttttcaaaaatgatgaattattattagatttacaattatttgaaaatgttgatgatcaatataatttaaataattttaaatatgcttttaatcctggttcacctaatttaaaagctactggtcccctagtttatgttaattatggaagtgatcttgattataattttattaaacaatatgaaaatcctattgttataataaaatattcaccatatttgccagcttttaggcaaatacaaatggcagaaaaacacggagctgctggtgttttatttatatctgatcctcaactacagtcaatttattcaattgattctattcaacgtgaacctgttgcatttacaaataaatatccaggtaatatacttaatccaggtattatttcaggttcaattttagatcgtcattttgatgttgataaaaaattaagaaattcggatgttatgccatcaataccttcaatacctatttcttggaaagattttaaactaattatgaaacatttacaaggaattggtgaaagagtacaagattgggactttaaattatatgatgaagaaattgaaatttggttaggatcccctgattttaaaatgtcaattaatcctgatcttattgaacgtccatttaaagagagttggaatattattggtaaacttgaaggttcagaacaagatacatttgcaattgtaattggatcatcaagagattctgtttgctttggtggtatggaaagttcaagttcagcaattttaatggaattaatgaatattttcaatgaaatgtcattatcattaccttggagacctttacgttcaatttattttgcatcatttactggttcaaaatataatattgcaggttcaacaaattttgttattaaaaataatcaattcacccaacgtgatgtttatgcatatattgatttagatgatttaattcaaggtgatgaattagaattttcagtcgatccattatttaaacaattagttagaaatagtattaatgaaatgaagaattcaaatttaactgcattacctgaaattaaaatgaataatatagaaaatgatgatttaattaatcataaatatatttttaatccaatttcaaattcattaccatttcaacaaagatataatgttccaggaatttcggttaaactaataaataatgataatgataagtttaaggataacaattataataaatggaatgtacctaaatacccaaaaaattcatgtcttgatacatttaataattttaaagaaaatttaattgatccagatatgtcaaaacattcatttattacaaaattaattgcaaatataattgttaaattatcagatacaccaattttaccatatgatattttccaaatgattaaagaatttaaaattaatttagaggaaataaaaaattcatcaaatggtttaagtaatatagattttagtaaagttgaaaatttaattaataagattacatttattgcagaacaaaatgaagcatttacaattacttggaatgatatttgtgataatggtaaaggtactgaaccaaatttattaagtgttaatagatgggattggaattcgaaattattattattaatgaaagttttaattcaatttaatggtacttataatgatccttggaatagaaatttcctttatggattatacgatggtgaatattatgatcattttgaattacctggtctttcacttgctagaaattcacttgattttgatggtttacaaaatcaattaaatgaaatggaaagtttacttgagggatgtatttcattatttcaatattaattgttagttaagttatattatataaatttttttataaactgtttaataaaacattcatggatttgaaactattaattaattcaggtttaagtaattcatcaaatgattcagctaataaacaaacagtttttaagaatttaattatttcattgtaaactttctttgaatttttgaaaacttcattattatatttttcaaaaatggcctctttattttcatttgataaaacatctctaataaaactactataaattgtacttgaaattgatgatttaaatggtaattcagatgataaaattgtccaatctttattagtacgactaaacttatctaaatcacttctattttctaatagaatattaatcaaatgaattgtaattaaatcttttatttcatgcttcataacttcaacaattgatctaaaatgaagtaaatcttgtgatggtgataatattgatgattggttaaatttaaaatcattctttattggattaattaaaggtttaaagaaagttgtaaatttaataattaatgataaatcttttttatcaaattgtttatcaaatgaagatttaaataattcatcgattttaatatcattaaatctttgtaagaaaattgatattaataaagttatttcaatatctaaagtatttttaattgaaaaatttaaaagtgattgaccccattttgataaaacaaaggaattattatcactattattaagttcaataaatttataatcatataaagttctgagtaatgaagttgataaaatttcatgatttgaataaatttttaaattgaatacttcctttgaaagataagaacattcattgaggaatgaattatttaaatttttaataattgttgttaaatcaaatgatttagcagttgaatgtctaacaaataaagttgttaaatcttttggtaatgaaagtttaaaatctaacgatttagtagttggtagagatttattttgataataacttttcaaggaaattttttgattttgataaaatctatttaattttaaactaattaaatataatgataattctttaattttcattgattgatgaccagttacaatttttccataaattgaatcatataacatatctaatggtaatctttcaatataatttttatgtaaaattgattcaaaaattttaaaaatattcaaaccaattgattgataaaagtaaatttcttcgggtaatcttgaacaaaataaattatttaaattttctggtatttgatcattatttaaagtttcataaattgatttaacatcacctttagtaatatcaaatttattatcatcttttttatcaaataataaagttgttgaatttttaacattaattaattcaactctaccatcgatttttaaaacgggacaataattcaaagttgcaattccattaataagtaaatcaattttatttgattgatttgataacattgaataaatatctgattttattaagtttcggaaattataattattttcaactaacattaaaggttgaattatattaccaattgacattgaaatatttttaaattgattaaaactaatttggaaatcatttaaaatttgattaattgatagatatcggaaacttttatttgtaaaatccaaatcaatgatgaaattatctaaatcttcaaataataacatttcatttgatgaataaatacaattgattatatttgattttaacatataatataattgattgtattgtaagaaaggacttataatgaaatctaaattattatcacggaatagaattgttaaatcatcagttagagatctaataagtgataaatcattgaatgatgttatattagtgaaggtattattattattattattattatttccccaaattgattgtaaatatttttcataaggagtaaattctggttgttcagaataaatgaattgagagactgattttaaacctggaaatacaaatattggtttaataccatttttaataaattcatttgaatcattaattatacgatttttaatgaaaatcggtaattcatcaccaaatgtaatgagccaattttgataattttgttcatttgataaaattgaattaatataatgaagaacgtcaataccaatgacggtatcctttaaatcggatatagattgagtgataggatgacaatctagtgttcttattggcatattgggtgataataaatgatgaaatgttaataaaaaagtggttaaagtagtgaaaagtagttaaagtagttaaaagtatggaaaatggaaaaaagggcaattttacagtgagaaaatcaaagaaaattggaaaatgagaaaatgtggtatattattggtattgtgttcgaattctttagtaagtggtatattttctctatttccattacatgacacgttgaattattatcataatgattatatcatgatggagtatttcttttaatgtgttctattagacaactacagttatgaacttatttagtatcatatcgtacctcttactttctcttcacacagtatttgctatctcctatgaggaagctctctctgaagttggtaaagatggtcttcttcatataactgataaaaattataaaaaattaatgaaaaataatgattatggtttggttgttttattaactgctgatgatcctcgtgttggttgtactctatgtgttcaattcactccttcctataaggcaatggctcaaagttattataataatttatttgatgaggaaagtttaatgattaatccaattgatagtaaagatgataaatctaaaattattttcggtatctccgattatttatctgctaaagaattctttggtcttttacaattaactgcagttccaagattattttattatgctcctggtaaaggtcctcaattatctcaatttacaaatgaattctccttcttagcagtggaaaatactgatggtttcattagatggatctcaggtaatgtacctggtttagatattaaattcttgaaaaatgttcaaccaccttcaaaatcaattttattgacacttatcataatcctattatcttcaatcattgtattatataaatttcaatcacaaattttctcaattgttcaatcaaagaaagtttgggaattcctatcaattggttcaattattttactaatttcaggttatatgtataatcaaattagaaatgcagaaatgtataaagttgataaagatggagttattcattattttgctcaaggtcataatgttcaatttggtactgaaactcaaattatgtcaattatttatacaactttatttgctggtttattcattattatacaagttttacctcaattgaaaaatcctcgtaataaacttatcctctcaattacctgcttcaacctataatgtttattgcttatagttatattattgcagtctataaattaaaatctccaagttatccattccaattacttagatcattagttggtttataatcttgtttataactctatatatacatactctaaaattacacttcatcctcctcatcctcctcctcctcttcatcatcaccaatcatcattgattccattctattaactcgtttctcaacaacttcaataatatcttcaatctttttaagtttatctcgtattctgacaagtctcttcaaataatcatctaaatcaacacgttcattccgtatcacctcgtcttcatcttcaccttcaatggggaatgtacccggtcgtagattattacctgttttaactaacgtattctccattttatctaatattgaacgtaatattacttgggaatcatataaatttttcagatgtgaatttaataactctaatggaccttcaagtaatgattgaatggtcaattctattgaatgaacatccgtattgatagtagtttcactcattgttcagtggataatgatcaatcaagattggaaaagtacatgcaaagtcgatattatttgagatttttcatgtgcatgcatgattttcaacaactttttgcttttatcatcactttacaatcatgatatattggaagagtataacacaatctaccagattatattcaacaaatacactttccaaacctctattgttagatatattaccatctaaaaaagttatatctaaattattatttgattttgatgcacgttataattttaacaaatacctaccagttattgaatcaatttatgataatgataatgataatattaatgataatgatcaaccaaaaatagaaatttcaaataaatttatgggtaatgatttacttatatatcagagagtacttgcacaaataaggaaacaaactcatacaattaatccacatcttttaaaacttgaaaataaattaattgaacaagcagctcaacatggttccagagatgctctttgtactttatcatttatggcattggataataatggtgatggttggacagaaaatgacaaatcaactgctaaaaaatatattaaagaattaatgaaattagaacatcctttagcatttaaacttgctgctgatagagaattaaagggttatacagattctttagataacaatgaaaaactgatagaagagaaagaaaaagaaattgaatttgaattatcatcagaggcagaattaactccaacattcagatgttaatttctctaatataacatcatcaccaaaacaattatcaagagctgtttcattataccaacattttcttaaacttgattcaaaatcaacagttgcagcagcagcttatcgtagtttaggtatgatttatttccgtacaaatgaattaactaaatctaaggaaaattttgaaaatgcaattaaattagctcctgcaactgataatccacaagcacattttttccttggattattaaatgaaggtgatccaatgaaatcaaggtatcattttcaaatggctgcaagtgaaggatttagagaatcttttgctaatttaggttatattgaattaaatgttttcaaagatttatttaaggcaagagaatggtttgcattaggtgcagaattaggtgttaatgaatgtgttattggattatttgatgtttcagttaaagaagaaaactggaaaaaatcaatggatataataaatcgtgcagaaaagcaaggtatgaataaattattattagaagtacgagaggaaaccgtatcaaaagtgaaaagaataatcaacgagatggacaaggaaaaggagaaagacaaggaaagtgaaaaagttacgattgataaagatagtgacaataaatcaagatgggatctttaatgataaaattaactgtttatagaatatttttttagaattaataaattaccagttctacgatcatcccaatgaaatggtgcattccaaatactacgatcaatttgataatttgatttaatgtattcttccaatgtaggattattatcaaataaaatttcaaatacgataagataatcaggccattgatgtggccattctgcttgtatatttatactttgatcattaaaatctgggaaattatcttgaacaaattgtaatggattttcataaaaataatcactttcatccatatattcactaacagtaacaccatcctttagatttgttgaaagtggaggttcacatgttaagaaccatatttgagcttctgaatcatcaagatggaaatgtgattggaatggagttgaatgacagggtgttaaaaatccaattgttatgggttttgtagcatttatactttcattttcctttattactattcctctcattatactaggtatttgatattccccagtttcatgatatcttgtaaaataatatcctaacatacatgaggatattattgtgatgaaaatgtacaatttcatcaatttatttgatactctattggaaattgacaatatacccgatgcagtatatgttaataacattggcattaatggataaataaaacgaaattctttatgtgaaatgagggaaaagataaataaatagaataacatcaatgtcttaaattctgaccaaggagttttcaatattccaattcaggaaaaatatcaggtaattcaaaagtaagattggtattgcttgaacaaagtagaatgatgaatccgatactccataaaaagcagacaaattatcaaatacattgaatttaaaaaattctattaatggcaagttccaagatgaataaaaataataattaactgatgaatctatagctaatacaatactaccaataaatgaagcatccataatatacgatgcatggttgaaaaactcatatggtagatagaatatccaaattattgaatttgttggacgaataatacaattaattgcagcaaatagtaaagactttgaaatttgtgatgcttctaaataatagagtgaaataatagtcaatgaaagttcaaatgagttggcaaatgatctacaccagcaataccaattccaagctgagaatatactcaaataggatactaatattgctaatttcttattgttaaactttagttgaatatatctataaagataaaactcacccaatgaagcaattagtgcattgataaatttagggcttaattgaacaaatattgtattcaacattcggtggaagatttaattgtttgataatccaataaggtatcatataaataattgggtgtaaataagatcttaacccatagttccattcccatgtaagatatccataaccgaatactgcagcatgagctggttctaacacttgccaatattcatcagcttggaaaaaagtgtcaatagaaagggaattgatcaatctaaatataaacaaagcccatagatgtaggtactggtagccttatttaagagttgtgtctaaccaattggcatcaacaactgccatttacaattagtcgatgaaatagacttgacatgattatcctaaggtcaatgtgtccatgccagtctgtaaaaaaaatcatgcatcttctcaactaaggctcttgtttttattttgtatgccggatttcttattcttttctctatgcaatctatttattaattttattatacatcacatttaaacaactggtaaataatggatggtgaaactaatgcatcactgtctcttatggacagtcgattttctgaatcaaacacttcattaaccatttcttccataaataatacacacagggacaaaaaaatttctctcccgcctttatctacaattcttacaattcaagacactattctcgtgataactataaccatgagagagatccaaataacgataccgattatgattttagcttaggtgataatgaaaatagttataataattataataataataataataatacttataaaaatgacaatgttctggataatttgtatactactccaaagattaataattatggcgggtttgatgaaattaatacaccagatactcccatcactccagtgacgccctctatttcagaatatagagttaataacaaaaatagatacccacttaataatgaaaaattacaaaaatttgaattaaatccaacactttttaaattagaattacaggataaaattggtaaaggatcaaatgcatatgtttactcatgtcaattatctaccaatgggatttctaatagctcatttaacatagcagttaagataccaataagtaaaaataaagttaaatatattcttcaagaagcaaaatttgcaatgaaattaagggaatatcaacaggaatggtttaaaaaagaaaatagagtatatccatttatagattgttacgggttatactatttaaataaaaatgatttccaattattcaaaccaaatgatgaatttccatgtttagttatgaaaaaaatgtcttttagtttaaaggaattaattagaaggacctcgataataaattctcaacaacgaaaaacctccacaacattaaatttgaagatcaataaacaattatggtggaaattatatcaaacattaaatgatgcattaagtatacttaaatcattagaatctgtacattgtgatctaaaaactgataatataatggtatcagcatatggagattcaattgatgatatagaaaatattgaatttaagataattgatttttcatcagcaaatgaaatcaaagaattagctaaatgtcctgatattacattacaatatagtgcacctgaactaatgaatttccaaactaatcgaataccgacatatttaagtgataaatttagtgcaggacttatattattagaggcagcaactgggtcaccaccatattcattagctagttatgataatttactgttactgacagcagttaaggagggtaaaccatttgaatggttatcagcagaggattacaatgtcttagaggcccatcctgatgttgtagctgtattgaaggagatgctctatgcaagataagaaagaaagtcttgaaaaacaaaaaatccgcgcttttccttttttttttcttcccccgatttcttttataatttttttaattttttttcttttctttaattttcgcaattttttacaatacagtttctatttcagttttaatttcaatattattgcatgcatgtctttaggtgtaatagataatctctttgattaaatataggtttaactatagtaacctattgataaagtagatattataaggtaaattagttttgaactcatatattatatagtactatgtcgcaagtggaggcatctgagaatatcgcacagggcacatccaccattaattcatcggatacacataatattatagataatacaacaattaaagatataattaatgaatcatcccaatccaataataataattcaaataaggatcaagttttaaatatatcctgatactcaattctttaaacaacctgatatcaatcaatctaatattaatattaataataataataataatagtcataataatcataatgtaaacatgaatattgttgattcatccacatatggaaaatattccaatcaatatgaatttagatgaaatacataatgaaatgaatgatattagtgatatacacaatgatattaatgatatgaatatggatttaagtatgaatatgggtatgagtattagtatgaataatataaatagtataaatatgaatatggatgatcttaatatgggcatggatgtagatataccgaatcaatcaataactgatagtaaaaataacaataacaatacaactatgaacttatcaacaatcaataatacaactatgaataatacaactgctttctccaatgtaacaggtaatacaactatcaatattccagatcctaaaaataatatcctatcatcctctgaaaataatgcaatcaaagttaacacacatcaaccatctaatttacattcatcatttacaaataatgatctaactaatcaagtagcagaattgtccgtggatatagatcaaacaacttcacaaaatgaattttcatcagtacccaataatatacatgataacacttccctaaagttagctaaaaatgatgaagaaactgaaactattcatttaaaccaatctcctgatgttataaaaactaaaagtatggctgaatctaataataatcaaactaataatatcataaattcacataacgcatcaaatcaattacaaccttttgaaaaatcaaatgaacaatcacaacatcaacaacaggaacaatcatcatctacagctgcatcacagaactatgaaaaaattcaagcttatgcaatgttggatttcgattcctttacattttatgtccaaactatgcaaatattattaggtagattagttgatggtgatccttctactgattcattagatattcatttaggaaatcaaaaggcaatttcaagaagacacgctaaaatgttttataattttggtaaccaaagatttgaattaagtgttttaggtagaaatggtgcttttgttgatggaaattttatcgaaaaaggtgttacagtacctttattaaatggaacaaaaattcaaattggtgaaactgaatttgtatttatactaccttcaaagaataaggaacttgaaccttctactccaaatgtaccaaacgatttggatgttgccgaccctctttccaaaaaagacaccaagaaagaaaaagtaaaggaaaaagtaaaagatactactaaggataaaacaaaacctaaaaccaaagcaaagaaacctgctaaaccaaaggtgaaagctgaaaaacctaaaaccaccaaatcaactaaagataaagaaaaggagaaagataaagaaaagacaaagataaagataaagagttacagattgaacatttggataatttagttgcaaattttgatgaaattaggaaagatttacataacgatcatatgttattaactaatggagatcctaaagttttagatatagtgtttgatctcgatagtgaaaaacgtgaattagaaattgagaaagaaattggaaaagttttagcccgtgaaagtagtgaacaagcagaacaagcggcagaacaattaactcaaccaaccaatttgaataacaaacctaatgatatcatcaatgacaactttattaaaatggaaactcctaatcttcatatgaatagtttgaatattaaacaagaaaatatgagtactctgagtaaagctgataaaaataaggtgaaacctaaaagacaagcaaaggctaaaaagaaggtttatacattagaggaaatacccgaagaatatagaaataaaccaaacttaccatattctattcttattactgattgtttaagacaaaaaggtacagaaagaggtatgtcactgtctgaaatttataaaggaattcaagatttatatccatattatttctattgtccagatggatggcaaagtagtgttagacataatctttcattaaacaaatcatttagaaagatttctaaagagggtaaaggttggttatggggtgtcaatgaagaagtgattgcagaaaaggataaagcaagacagaaacaacttgaaaatgcaaaggcaaagggtaaaacattaccaagacaagttcctaaggcattacacggtaatttacatttgaatactccaggtggtacgaaagttccattgagttcttcaagtaatacatcaaatacgagtaaaaataattttataccagttcaaatgaacaataataatataattacctccgagagtttaaatgcagcaaatacccaatcaaatcaatcattacaaatcaaacaatcaaatcctgcacaatcttcaactcaatcaactacttcatcatcgtcaaataaaacagcaaataaaaatgataatatgtcagctaatactaaaagagcattagcatatttacaaaaagaattaattttcttaaccaaatcaagaaaaatgtatgatagagcaacatcaacagaaattttgaccaaagcattagcaatgacgatttcacaagttgatcaagctgctaaaaattttgcaattaaaggtttcccacttgttacattaattgataaaaatcctggtcatgttacaaagattttaacagctgcattaaatgctgcaactttacaagtttgtaaacaaaaaggattaacaccccatttaccacctaaaaatccaacaccgtcaacaaatacaccagcacccactcctacgggaacaaataatgcatcatcaacaaatgcacagaatccaactgtcaaatctgaatctaaacctgaaaataaaaatactccacccatttcatttataaagcaagaacctggctgatttaacatctagacaaggatcaacatcatcagttggaacaacatctaagataaattcagcgtcgcctagcaggaatggttcctaaaccaggaaatccaattattaataaagcaaggcctattaatcctaccagtttctaaaccgtctgcagatggtccgaaagttttccaattttctaataatacaccaaaaccaccattcaaacaacaaaatgttgaaataactccatctaatatgaatactaataaagatattaattcatctattccaattactaataaaccatcatttatgccatcgattaaaccaattagtaaaccaacaactgaaccaattactgatgactcaaataaaaatagcacagataatgttgttaaaccaccaattaaattaagttcagggtatgagtaatattggtattatgaagcctcaatattataataagggtaaaaccacaacaactacatcaagcggaatttcaagtttgaataataaaagtattgatgatgaagagatcaaacgtagtattgccaaatttggtaaacctacagtacctaaacctagtgttaaggccgatgaatttgataatgaaataaaaatgaacgatataaatactgaaaacaatgaagaggtaaaggactctgaagtatttggaagtaatgaaattaccaacactgaaaatgagttggttgatactgagaagaaaaacgaagtgaaagaagttagtaaaaatgatatgaatgatggtaatagtggcaatgataatagtaataaagatcaagatagtgacaatggagctgataatgatgaagatgacgatgaggatgaagatgatgaagaaggaggagaagacgagttacaaatgatgcttgaaaacctcgaacatagtggtgatgaagatgatgaagaagacgaacaggaagacgaagaaaataataaagacaaagacaataaagaaactaatatcaatgccaacgaaggtaatgatgatacaaatgaaactgaaaagtcagaagataataagagagttttagagaatgatgatgatttagatgatcatcaagataaaaagataaaaatatagttttatcgaccatgtatattaacaatgtatttttataataataatatagtattatgaaatgataaaataaaaaccgtatctattagcattaataattttaagttagaaaaaatagttctacacaaattaccacagaagtagagatcattatcccttaacattattgaaagaaccttccttttctttaatttcccaaaatagaggaccaacatcatgattaccatggaaagtccaaccttcctctgttatatggaataaattaattgaaccaccagaataagcatctctatgagcagcagccaatatagatcttttacctaaatataaagcatcttcaactgataaatcccatttataatttgaatctaagacaccataagcaaaagtttgacctgaaccaacacaaaataaatcaccctttaatcttgtaccatctgaatcaacataataaattgttggaccttcctttggagtacaaccacaaaccattgtacccattgataaacccatacctttatattgatatactaaatttgataaaatttttgaagcagctgcaacagttatacgttgtttatttcttaattcatgtaatctacattgagtacctaaccaagtttcccaatattgacaatctgcggcaccacctgccattgtacctaataacattggattaatttcaataacttttttaacagtttgagatgcaatccaattaccagcagttgcacgtgaatcaacagctactataataccaccttggaaacggaaagctaaagttgttgtaccatgagcaattttaattgaacaatcaggatttgtttcatcatcagtatgagctcttaaaaaatctgttggttgagagattggaggtattgatatattaggtgataatgaatttatactattattatttatcgtatttggtaaaccattaaaagaaatttctttgttataatcaagtaattctttatctaaatttgatttataagaatatttagagataatgtcattaacggacatgattgatagtataagtaattagttttaagataaacaattgattgttttaattgataaaatatatgataaagattgtgattctacatgaatttaaagtatttgcccttgtagataatagtataaattcatgataatagatcttacctaataataaatgagggtgtacggataaattttataaaatcgtacaggtcgatcgactcaaaacaaagggctactccagccctccattacctcacgtgacgcacgcaaataaaaattcaaaaaaatttgctaataattattttcattttataatttctcatattaatttattgtgagtgaaaaattatttcctatagtgaaatgtatagtgatgttaatagtgaataatttatgagtttagtattactactattattattattattattattgtaatttactttaatttttattaaattctttttgaacttctatctcctttaaacaataacgaagtttatccagtaaatcaagatgtctgacaaacttaacaactccatgagagaattaaagattgaaaaattagtcttaaacatttgtgttggtgaatccggtgatagattaaccagagcatctaaagttttagaacaattatcaggtcaaactccagttcaatctaaggcaagatataccattagatcattcggtattagaagaaatgaaaaaatttcagttcatgttaccgttagaggtccaaaggcagaagaaattttagaaagaggtttaaaagttaaagaatatcaattaaaggcaagaaatttctcatcaactggtaatttcggtttcggtattcaagaacatattgatttaggtattaaatatgatccaaatatcggtatttacggtatggatttcttcgttgttatgggtagagcaggtttcagagttgctagaagaaagagatgtagaggtaccgttggtaaataccacaaggtttctcaaactgattcaatcaactggtttcaaggctaagtatgatgctgatgtcattggtgcttaaatgttttattaactttatatcttaatctttataacattaaattattaaatagataataaaatagtaaaacgtcgttgcgtctgtcacataaaataatttaaaaaattaaagaatgaaaaaataaaaaataagaaggctttgaagtcttaaaggttaaactaaagggttcaaatttaaagggtggaccctgttatagtgtgatagtgttataaattatataaattatacctctttagtgtacatgcatgtgtgttgattactataatttactttgatttactgcttatattttacttattcttcttcttttctcttgtaataattactcttccttttattatattatatcctaatacactacaatattacatgacatctctagatccagttccgtcgtgttttgctcgccgagtctcctttgataattataaaccaagtactgcttcagcacctgttgagcctcctaactggatattttttccccacgtctacatccacaactaatacatcaacaacaaatacaactaatacattctaatacagccactccaccaaatagcaagggacattccgacaacccgtccacattacccacccattcaatattgaaaaagccattgttagcgaatagtgtcaataaaggtgtcaatttaattactgatagcgataacattagggatgaccgaaaaaatttaaatactgctacgcccttatctaatgatactttaaatgatagtccttctttctggtgttagaaattcttttcttaattcatctttaactagtttaaatattaacgacaataataataataataataataataataataataatggcccacaatttacatctaatgcatctaaatcctcaaataccttcaataacaacattcgcaagaaatcatattcagaaatgtccgattctgaattactcgctttggattcgcaatttaatatcagatccattgactttcaaaaaagttacggtttcaatgttacttcaagattaccaaataatcccctctctaattgcgataaagatcttttagattcaaataatattaatacaaatagttttaaaaatttagttaatatttcaatgttaaaagattatccaacaaagccaattataactaaaaattcaatttgtattaattttaaacattcaaatttatcaaataatgatattaataataaattttaccttattttgctatcaaatcgatcttcatctttatcttgctttaattattatattaaaaatattttatcaaagggtgatacaattgtaatatgttgctccttatcaacttccatattaggtaatgaaattaatgattcagttaataattttattgattcttttgttggtttaatcttatctcatttagaatcaaataatgtacctatcaatattaattttgaattctttaaaagtttcaattatttaaatgaagtattgaatctttatcaaccaagcctgattataattggtgaaaatattgaaaaaactaaatcaactgctatatttactccaaacaaaaaattattatcagttgtctatgttgggaatgattatgcatctggtgctgcttttaaatcttccaagaagaataataataataataatgttaacaatacatcaaatacaaatgtaagcacaagttcgcatacaaattctaaaataaatcatgaaccaacaatcaattttaaattaccctttcatgaaaatacaacatcaacaaataataacaccataccttcaataaagattgaaaaatccccaaattttaatcctgtaaaaaaatcagcatcagtatcaacagattctcttaatttggattattcagaaaaattatcgaaagtgaaaactaatgatactgctatctcttcattatttgaaaatttaaatgagacaacattacaagatttaaatatttcaaacccaacatcaaattcaacttcaaataaaagttcttttagttatgataatagtaataattatttaccatcaacaactacgagaagaaaaagtatgttagatgttttaaataatgacaaaccagctaatctttcaagaactagctcaaatatctcctctactgatgattatggagtcattgatagtgatgatgatgatactactactactactacaccattaaaaaataattatacattatcgaaaaagaaatctaatacaagtggcactagtacagatccatattcagttcatcaaaaggaaaaacaagagctttttgagaaatataatcgtagattatctgctgttaatgttaaagcttctaaatcaaaaaatgccaataccaaagatatcattgacaatgataataaacaacaacaacaaattgttgataatgctaatgaaccttctaaaactaaaaagttatttaaaaaattgtttagataggccagttctaaactatcagaaaaaaaaagaaatagtatagcaaaattgcatacatgattatgggttggttttttgggtttctgttgtgtattatacattaataatatatacgtgatgtttttgtgattttcttttctatcttaatttttcatttcaattacgttctttacttactaaaatccattatttctataaactatattttgaatttatactattaattacataaaattttaaaagtttgatgggtttaaatgacctttaatttcaccaaaattttccttgatacttctaactgatacaaatcttgtaattaaagctgctgaacctgctttatcatttgtacctgataatcttgaaccaccaaaactttgttgaccaacaactgcaccagttgatttatcattaatatagaaattacctgcagaatatcttaacctttcttcatatttccttatattaactctatcagttgaaaaaattgaaccagttaatgcataaccagttgaattatcaattttttctagaatgttatcaatttctgaatctttatatttgaaaatagtcaataatggaccgaaaaaattcagttttcatgaatgaatgatcaacatttgaagtttcaacaattgttggtttaataaaataaccttcagatttatcaaatttaccacctgataataaagttaattcattatcattttcaattgatttaattgcatttgtaactttatcaaatgatgcttcatgaataactggtcccataaaaccttgtaaattttcagaacaattagttggttgaattgaatcagcagtcttaactaacaattctttaaattgatcataaattgattcactaacataaactcttgaagttgcagaacatttttgaccttgaaattcgaatgcaccacgaattgtattaaatacatgcattttctaaatttgcagtcttatcaattaaatggaaatttttaccaccagtttcaccgacaattcttgggaaatctctataaatacctttaccaacattttcagcaattttagtccaaattgatgagaaaacttttgttgaacctgtaaaatgtaatgcagaaaaatttttatcatttaaaacaatttctgaaattttaactggattacctggaacaaaattaataacaccatctggcataccagcttcctttaaaattttatataataaataatttgataaaattgatgaatctgatggtttccaaacaactgtattacccattaatgcaggtgcaccaattaaaccacctgcaatggcagtaaaattaaatggagttacagcatagacaaaaccttctaatggacgatattcagttctattccaaacaccagttgttgattcaattggttgtgaacgatataattcagaagcatatttaacattaaatctgaaaaaatcgattaattcaccaatacaatcaatttcaccttggaaaacatttttaccttgacctaacattgttgctgctaacattttatatctatattttgttgaaattaattctgatgccttaaggaaaattgctgatctatcagcaaatggcatattagcccaaattttctttgcctctaatgatgccttaattgcatcttgaacatcttgttcattagcttgacaataatcacctaaattttgtttaatatttgaaggattgataattctcttggtttctctattgaggatttctttaccattgataattaatggaactgtttctggattctcagagaaatatttaatttcttgatttaataattcccaatctttaacatcttccttcttaaataatttagtatattcattggtaatatgacgtggagattcgaaatgacctaactgtgcattacttgaaattccacgtttaccaatattaattaaattgattttaacaagattgttgattgtattgaacttaacagatcttcttgataatttaattgcttgtttacaatttcttgataacattgtttacagagagaaagaatagatttttgatttaaaaagaaggaaagaagagaagatggatggaatttaaactattaatataagttgtggaaaatcactaatctccatttaatttataaacagtttgacatgtcatcagtttaagggtaataataagcgaacagcggaaacttttagcgagaaaagccaatctatcaatttttacagtgaggaagttacaagcgagtttacttactatcttactaagttatcatctttgtaagttatactgatctaataagaataataataagaataatatattgtattatgttatggacaactatacatttatagagtattttattgcataaattattgattacacagtaaccctttcatcccaatctgcctcataatcatgtaattcttcatcagtttgatcatgaactggtatcaacagtggtcccttttgacttctttgattttcttcctcgatttctaatgctaatctcttattcaaattccaaactcccataataagtattgccataattgtaattgataaaataccagctcttgtaagttgccatctaaaagtttcaatctctgatttaagtcctgaaaccatatcacttaaaattcttgaattaagatcagaattctttaaattaagtgatttttgatgtaaattattttcatgtttaaattgattagattccattttaattatatcatcatttaatttaatttgtgcaattgtttcatcatttaaattattaaaacttctctttaaaataataattgcattagttaaatccattaatgaaatttctcttgaattagtaacttcaaacagtaattcactatgagcagcttcaaataaataagcttcattctctaaatcaactctaggtgagtaattaagattaatccatttaagtttttcctcaagtacatgataagtatatttcattaataaaactgattctttatcactaaatccacttcttttaaattcttgtactactttaaaagagtcaaaaaagaactccatgggtatattatcacccaactcaaatttttcacttggttcaggtatattagttgttgtagtatttgtatttttcgttatattgttaagctttttagattctttaataatatttttaatattatcctttgattttatatgatttttactctcaatatcagtttcatataatggtttaacatctgcaagttcacttaaagttggtatttcttcattatctatttttaaatcattatccttaatatcatcaattttattatttgaccctaatttattcgatccaccaattttagatcctattaaattattatttgaaagtaatggattatccagtttagaagaatttgttatcaaacgtcgctgattgtttaacttaagttgccactgcgatcgtaattgtaatctatattgtaattgaagtaattgacctttgttattagaatttattatcatcttccaaaacattgatcgacgtgtaattgtatttaatatcattgtcagtatgtatatgatatttacagaaagaaagaaatgtcagatagaagtcagaatatacaccaaggtaaagtctagaaaaaacaatgctcacctctaaagaggcgaaaacattactcttctgtataagtttacaatactaaagtttatatcttatttgttgatcaataagagacaaagatagaaccatgtctacaggcggagtagtgaagaataatagtgtatcattagatgatgaagattacgaatttaataatggaccattgagagtacttacacaagcagttaaaaataatgattcaataattatatcgttaagaaatggacataaattaatatgtacggtgaaagcattcgataaacattgtaatatggtattggagaatgttaaagagatgtggagtgagagtagtaatggtaatggtaagaacgatagtaaatcaaaggttatgcgtgaaaggtttgtaagtaaaatgtttttaagaggggattctgttgttgttgtgctacgatacatgggagagtgattatgatgttgttaatatacagtaactatgtattacaattgtgtacttttaaaattaatcaggttagatatgcatgttaatgttctttgtagctactaagctgaaaagacagtgaaaaatattattaccgagataaatttttcagtggtaagtttaggaaggtcttttgatgttttattagagacgggtgtgttgatcagacaatgatgatcaatgtggttagatctcaattaagaggattgaggtgtagtaatctatttaatggatttcgaaattctactagaataagaatagcaataagaaataattgtacaatacgtgaaggtattgaagattcattaataactccacattctgatgagtataaaggatatttaaaatataatgttgataataagattaatccaacgccaatattagataataatgaattatatgaaagaataagtaaaattccactaatgaattatcgtaattttataattgttgcacatgttgatcatggtaaatcaacattaagtgatagattattagaattaactggagttgttaatccaacagttgataataaacaagttttagataaattagatgttgaaagagagagaggtattacagttaaggcacaaacagtttcaatgatttataattataaaggtgaagattatatgtttcatttagttgattcacctggacatgttgattttagacttgaagttgttagatcatatgcatcatgtcaaggtgcattattattagttgatgcaagtgaaggtattaaagcacaaactgttgcaaatttttatattgcatattcaatgaatttacatttaataccaattattaataaaattgatttagatacagctgatattaatagagctgaggaacaaattgaggaaacatttgaattatttagggatgatattgttcatgttagtgcaaaaaatggacttaatgttaaatatattttaccgaaaattattgaaaatataccaccaccaaatgaagataaatatcatagagagaaaccattaagagcacaaattgttgattcgtggtatgattcatatgttggagttataatgttagttaatgttgttgatggtaaaattaagaaaggtgataaagttgaattttgtcaaagtggtgaaaaatatgatattaaagaagttggtataatgtatccagatagaagggaattacccgaattagttgcaggacaagttgcatatgttataccaggatttaaggatgcaaataaagtatcagttggtgatacattacgtaaagttggtagtaaagttgaagcattagcaggatttgaggaacccaaaccaatggttttcgttggagcattcccagctgatggtacagattttaagaaaatggaagagagtttacaacatttatttttaaatgatagatcagttgttttccaaagaactacatcaaatgcattaggacaaggatggaaacttggatttttaggatcattacattcatcaattttcaaggagagattagagaaggaacatggtaaaaatttaattattacagcaccaacagttccatataaagttaaatttaaggatggtagtgaaaaaattattattaatcctgatgaatttcctgatggaacaaagaaaagtcaagttattgaattaagtgaaccatatgttgaagcattaatgacatttcctaaagagtatacaggagccgttatgacattatgtgaaaataatagaggtatgaataatgaattacaatatttaagtaatggacaaacattaatgaaatgtttaattccaactgcacatttaattgatgattttgttggtaaattaaagggagttacaagaggttatgcatcattagattatgaagatgggggatattatttaagtgatatttataaaatggaattattagttaatggagagagtgttgatgcattaagtacagttttacataaatcacaaattgagaaatgtggtagagaatttgttagtagattgaaaaatttccttagaattgaacaatttgaagttataattcaagcaagggcaaatggacgtataattgcaagggagacaattaaggcaagacgtaaagatgttttagctaaattacatgcaagtgatatttcacgtcgtaagaaattacttgcaaagcaaaaggcaggtaaatcacagttacaatccgtggggcgagtagcaattaagggtgaagcatttcaagcatttttacgtcgtgattaatgatattattgtgtataggatcatgtaaatagataataaacaggtatttatatcgatagataatattaatagatacacccatgtgttctaatagataagcaataaatacattacataatcacatacataaaaatcctttcccatttcccattaatcctccctctccctcttttaatcttttttatagtgtaaaccccactcttcaccgtgtaaagaattttatcactctattaacagtacacaatacagatcaaatcaatagataaacaatttgccactcaataaatataaccatgtatcctctacgatctcttcttcgttttagatacactccatctttctttccctcttattctaattcttattctcattctcattcttccttcaactatcaatctccatcctttaataatcgcatgcatttacatactttaaataaagatgatcaaaattcatcattgaatttatctaaatgtaatacctataattcaattaattcagaagaggcttataattataatgataattataatgatattgatgactcattatctgattcatcttcaaatacttcattctcaatttcaatttcaaatgataatgatagtttaatccctgaaaaggaatcttcattagaatctttattagatttaattcaaatttcaaatgatacttttacaaataaatcagaattatttataccttatcgtggtagaggtttatttggtggtacaatggccgctcaatcaattttagcttccctttattattcaaattctttagaaaatacttggaaaccaatttcaattcattgtcatttccttcatgcagctcaaccaacaccaaatttatattataaagttatacctttaaaatcaagtaaaaattattcaactgttgaagttgaattatctcaaaatgatcgtcttatatttaaggcaatggtttcattacaatcaattaatttaaaaggttctgcttcaaatatgaatggtcaattatttcataatccaattgctccaattattggtaaagatattgatcatcctgataatatgttatctcaaggtgaattatttaaagtttggtctaaaaaggcaatgaataaacctcatttacaatatttaaaaggtcaaaattgtgaagatgaagttataaaatgttataatagagaaccttttatttggaaattaccaaatgatatgtttaatcaagatttaatttcaaatgaggaaagagataaattaacttctgatagagttttaagatattggattaaatcaaaggataaattgaaaaatccttcaatttttaattatgttgcaattgcctatatttcagattatttcttcttaagcgctaatatgagacttaatttacatgaaatgtttacaactaaattctcagtttctttagatcatacaatttattttaataatcaaattgatacttttgaatattttaattataatataaaaaatttaaaagctggtgaaaacagatcaattatgtatggtgaaatattttcatatgatggtcaattagctgcaactgcaattcaagaaggtttatctgttatttatactgattaagcacaattaaactacatccaatacccctatttactacatacattttatactattcttattatttgttatttgtttttaagcctctttcctatctccttttgttcttttttggaaattttataccctccttttttctaaatatatatcctttataatcttttctactacaaaaaaaaaatctatttccataactgctgcattattaaattataaaaaatgtttataaaaaatgtttataaaaaaggaaaaattatttcttactttttctagattttttctttgaataaaaatcatcatcactatcgtcattatcagaatttgattttgattttgatttgatttgatttgatttgatttgatttgattttgatttacttttactcttagatttcttcttactctcatattctgaaaaatcttctgatcctgaatccattgggtttggctttgattttgaactagatttagactttgatttagatttagatttagattttttcttactttcgtaatctgtgaaatcctcagatccagagtccatagggttaggttttgatttactcttagacttggacttagattttgatttcttgctttcgtaatctgtgaaatcttcagatcctgaatcaaatggatctggtttagacttagaacttgatttcttctttgtttcatattcagagaaatcttctgatcctgaatccattggattaggtttggatttactctttgacttagacttagatttggattttttattttcgtagtctgtgaaatcctctgaatctgaatccattggatttggtttactcttactcttactcttactctttgactttgatttagatttagatttcttcttactttcatactctgagaaatcttctgatcctgaatccattggattaggttttgatttagtctttgatttagtctttgtttttgatttcttactttcgtaatcactgaaatcttcggaacctaattccattggatttggtttagattttgaactaggtttcttgttactttcatattcagagtaatcctcagatcctgaatccatcgggtttggtttagattttgaattcttctttaattgttctgcatcactttcgtactctaaaagcattggtttcttaatcgtaggttgatgttcattctcagattcaatttcttcaacaatatattcaacatccttggaatgtttaactttcttaccattttcttcttgtttattctttgaatattttttggaagattttttactcttgcttttagatttcttatcttcagattcactatcggattcactgctagattctgaactactttcagaatcagtttcagattgatgtcttgatttcttagatttaggcttggattttgattttgacttagatttcaaactcttcctcttactatgtctataatcatcggaatcaatttcagaatcagattcttcagattcactactataatacttactcatcttcttcttatactttgtatcctcagatttcttagcactctttgacgttggatttggatttagatttactttttgaaaatttcttagatttcttatgataatcactatctgaatcgctatcactatcactttctgaatcactttcgctatcactatcactatcactatctgaataacgatgttttctatgtttcttatgctttctatgtttcttactcttatgtctatgacgtctacgtgatgaataatcaggaatcacttgaccactatcagaatcactactatctaataatgtattttgtactagactcattaaatccatattacttgataattcagatgcctttttatgtcctttctttttacgcattttcttttccattgcaagtcttaaaatacttagtaatgctgaaagttcagggttggattgtgctgtaactgctggaacaagttctgtgttttgactaataactggttctttttcggtgtttattgaagtgttattggtgttattattaccacttgatgtattgaatggcctgtcattataataaggatcgttattactacttgaagtgttgaatggtctgtcattataataaggatcattattactacttgaagtgttaaatggcctgtcgttgtaatagggatcgttattattagtacttgaagtattaaatggtctatcattataataaggatcgttgttattattgctggatgtgttaaatggtctatcattgtaataggcatcatcataattttccttttgattcttattattacctttaccacctttaccactgctatttccacgcttaccaccattattattatcgccgttattattgttattattcttattactattaccaccaatactcttaaacatatctaattgagatggtaatccacccttttttacagtattagttttagttaatgatttaagatctttttcaattggtacaatttcagggtttttaaatttaggtggtggtaaattcagatcatcattatcaggtgaaaccatatctttaaattcttcatattgatcacgttgtttcttttcacttgctgtaactttcctataaagtggcattttatgaactccattacttttcaatgcttcagtagttgtttgtccttcatttgcattcagaattgcttgtttcttctttttacgatgtcttgactttattctttttaccaggaaaatattcttcctcttcaagatcttccactgtctttaatgagactaattcttttccctcagcggaatcgtcatctaatttaatagtaaacgattctgttggtttgaatggtgttgcattacgcacctgtgcagcagtgatagccattagttaaaataagagagtatatataattagttgaggtgattgaatgcagagttttgtgtccattttgagaagtttcaatttttaaaatcttgaaaaatttcaaatttccgggtcagtttctattgttcataaaactgttgttatcattacagctaaactaattgtataatagcatgcagtatataatacactctttattaaatttttctatataatctatttaaacaaattaaaaagtgaaagcgttagagtacaattctgaatcaattttggaaatttttgataattttgatggtgaagcaggtggaacttcagggaatttaaaatcattttgatcattttgatcatttggctcttcattaattatttgtttctttggagattcaacttctggaaagatgaaagagtcaatatgctcgatatcattagattttgttggaatttgtgataatgaattggaaatttcaagtttattattagttggtattattggtttagttttttctgatgctgaaaaattaaatgagaatggtttttctgttgttggtggaacaatattatttggtttggaactgaaaacagtacttgattttttggtgtgaggtgtttcttttgcaaataatgatatattttcagttggtttaaattcttcggttatagattcattcttctcaaatggttttgtctgaaacataggttttgtttcaaataatggttttgtatctgctttgttttcaaaaagtggttttgtatgtatattatttccaaataatagttttgaatcttctttgtttccaaacaaagaattatttcctttattatttccaaataatgatacagtttcatttttttcaacacttggtttttcaattttttcattattaaaagtgggcttctcaacatcaagttttccaaacagaggtttggtttgttccttaatttcaaatgatggtttagaaggttctttaatttcagatacaggttttacgtcagactttttctcaaatgaaaacattggaggttgtttcttttcaaaagtttcgatttttgtttcctttaatgtaggtttttccagcaccttttcctttccctcaaatattggtttcataatatctgatttaccatttgaagtagatgcaatttcagtaattgaatcatcatcaactgttataatatcagtatctaaaatatctagtaatttagttgcagtcttacttaatttagtaggttctttaacatcattaccttttttaatatttgatttctcgttaatttgagtttcaggagttggagttggagttttgtccatatttgataaatcaatagttccaccattataaactaatttatccttttccttattttccttttggcgtttcttttctaagaatgcagaaagtgatgattttgatttataaggcgattgtaaatttgtgtaacttacgattcttcttttttgaacttgactattattaaggaatgaagttgtcatattcattgaattattgattgattgattcattgaagtatttcttgaaacatttctagatacatttctagattttgaaataaatgttggagttttgatttttacaggaacttttaaattatttgaagattttcttaatattgttgaattattcatatcagcaaaagacattgaagtatttcgacttggttgtcttgattgtgatttctttattaaacttaaaacaccttcaatttctatatcatttaatggttcatcaccctttttactgaagaattgagaaagtgtatcattaggatttttagaggtaaatgaaacattagaatttattgataaatcaattgccgcaacacttacattattttgtgaatgaaattgtgattgtccattaggttttaaatattgtaaaggttggaattgttgagatttgtcgtataattgagctttggatggtgggtttgttgttgctgttgttgttgctgatggtatttttggttcttcctttagttgttgcttattgaaaaatccttttattttttggaacatggataaaccattagaggagttgttggatgttttgttggatgttttatcccctgaatagtaaggctgatctatctgggtcgttggtttattgtattttggcatgaggtttgtttattataaaagaaatatttcagggaattattaaaaagttaccagtcactggccatgtcgatgtgatgttaacaaaaaattaatttttcaaagctacgggaagcgggtttcagtactgtttcaaattaataaatgtttatattagaagagtgcatgtattttttacacattagtacgaataattattctttctatactctagacttggtaggatgtactttatacgcagtatggtagtatactatatagttcttttaacaggtcgttttaagaaatcttgactataggatttgatttagaattttagttatatagtggatgagatgcatatggtttacgtaatcagatgaataatgatttaatttaagattagtatatagggtaaatggtagcaagtagctgagcatttttttaatttgctttcttttaatactttagaacaaacccaacattagaaaatgagtgttgattcgtaaaaaactaaaagatatgctatggaattgaaatttttaaagcaaaattaccttctgaattaaagacttttgggcctgatgatttaagaaataatatttgtttaaagaaagcattttgcaatgtgatttcggagttttacaaagatattaaatttagagttaataaaataaacattaaagcatttgcgctttctattgtgatagctcttgaaacaaaaatatattctcaaccaatgaatgatacacaaagagaacataaggaaggcttgaacgatattaacagtgaggattttagagtagatggtttaaaacttaacaatgaaaatattcaacaagtcaatgaagtgatattaaaaagagcacaaaatgaaagaatttcaacaaccaacacttttcttatgagaacgaacagtcaatggtaaatcgttacataaattgggatatcaaataggtgcaaaaagaaaatttgatgagatcgacttaccagatagagatatttctctttattctgatgacttatcacttgaaaaagagttttatactaaaatttctgattgtgtactcacaataattaagcaagaatttgaaagtagaagtttagagtataaacctattcgaaataactttcatagtaaattttgcccacctaaattatcatcatcatcatcatcatcatcatcatcgtcgtcgtcgtcgtctcttcacgaatcagaagagaatattccagaagttgagatcagtattaattcatctccaagagtttcagttgttccagattgaagataaatattcgtggaaaaaaaattcggggtcttatttgctatattagtttgaattgaaatgcaatttgtatatgaatataaagtttattgagtaacacctttctaaagtactagcagcgaatggcatacatttattatgcttaaaaattcagaccagtacaaattttttttggccatttcaaatactctttgtactaatcttaattgttaacatccattccaattcaattcagtatacggcaccaaactattacatgcactatcaagcataccacgcaaacactcactcttgtgggatttgatgaatagaatagagtctccgtggctcacctttaagtaaaattaaaccgatggaaacacagtgtggtcggaatcctatagcaatttcccgattgggaaaatgagttcttttattatggcgtcatttacggtcttcaatatatttctaaatagacctaagaaagatatatgaagaaagtttaaaaaatagacgaataacagagcagctttaataaatcgatttgtgaagagtttggcataatcagggggtgtatgcccatttttatggtccttatgagcagctggcataaatttactgtctgataagagaatattattactatagtaagagcataaaagaaaaacgtttattatggagtagataagattctgataaggaaataacaagtccgaatggtgataagtatagtctacaaagtattttatagtaataaaacactaggataagaaaaaaaacagtttcaaatcttatgtgtagattgcatagtggcacggccctctatataacttttaaatgtaaacattaaataaatttttttgttgtaaaacttaataggtgtgtatcctcactatacatggaaatcattaatggggtgttaatatcctatagttagcgtatatgaactgtagttccacagttatttaataaacatacggcttcagtcattcctgtgacgggccgatggtggtaatacaactgtaaataataacaaagtagtaaaagtaaccacagtaagctaagagctagttatgcccaactattattaaaattataccaagaaaattggccgtatcaatacacggctcggtgagaaatgtgtcaaaaaaattttaactttcgttaatttggaaaaagtaatttcctactagttaatctctttttatctctgtttttctattgtgagaaccatacggctatacgttttgtttgtgcttttctgctggtggaagcttttcttttttcagtggtttattattattatctcttatcaataatttaatttactttaatttaatttaatttacataaattttaattaagtcatacttatttcgaaaagaaaacactttgtttatctacttttctgtttgtataaaagcttaactactttcctttaaaaatttttatctctaatcatctcataatcctttatttttatttttttatttattctattttaaattttcttttttatcaaggcacactcaatctacaatgtctgagcttaaaccagttcaaagtccaggatcagttatttctaatataatctcaaataatgctaatgctttagataactttgctcttgaaaatgacgatttcgatgaattcttagatgtcccattagaagaatttcttcatcatgcaaaacttcaaagagaacttgaaaaatctccagattatggtgaagcagcaccaactattcctttatgggaagttattagaactaaacttttgaataaagaaccaaaaaattatgcaggtaatactgaagctttaactattcaaaattcttcaaatgttgcttcattagataaaattgatgaaaaagttcaaacaactgatgatttaatctctgaaccactttatacttcaaaggaaaatgcaaatagaatgttaagaattgcttcttggggttcggtcttttatttaatcacaacagatattttaggtccaacttctgctccttatgcaattgctcaattaggttatgttccaggtgctcttctttattttctttttggtattgctgctgcttattgtggtgttttattatggaaccaatttttattacttgattcaattaaatatcctttaagaaattatggtgatgttgttggtagaatttatggtagaggtgttagatattcaattgatttctttcaatctgttcaacttttctgtaatgttgcagttattattttaggtaatggtcaaggtttatcacaaattgctaaaggtaaaggttgttatactattttaatttttgtttgggcaattgctggtgcaattgttggtcaaattaaatctttagctaaatttggtttcttagcaaatgcagcaatttggatgaatgtctttgtcattattgctactatggcttgtgtctctaaatggggtccaaattatgttgctgctttaggtaccaccggtactactccaggtccagttttaactcatgttgttattagtggtggttcaaatgaacaattccaaaatcaattaaacgcatgtatgaatattgtttattcttatggtggtgctttagtctttgttgaattcatgtctgaaatgaaacgtccatgggatttctggaaaggtatggctgcagctcaaatgttcattttctcaatttacttaatctttgctatggtcgtctataaatatcaaggtcaatatgttattaatcctgcaaaccaaggtatctctgaatatggttggcaaacaactactaatgttattaatttagtctctgcattgattgcagctggtttatatggtaatgttggtaattaagtgtctctacaattctattttccaaagatttttccactggccaagtttaaatagtaaaatcggtcgttggatttggactgtgtttgtctgtgtttattgggcaattgcattcgtctttgctgctgcaattccaaatttctcctctttagtctctcttattggtgctgtctgtattttacaattcagttatactttcccattcattttacaattcggtttagatattcaacttggtgcattagttggtgatgaaccatatgattacgttaataaaattactcacagagttgattcttggagaaacttttcaagatgggcaagaggttacaaacaaaaatggtttgcaaacaccattcatattattcttttcttagcttctcttgcaactgctggtttaggtatttattcatcttcaatgtccttaaagtcagctttccaagatggtactactacttctttcacttgtaagtcaccagtcgcatagataaattaatcaagttaactgattaatttaattttaatttactaataacttttaattttatatttttatatttttacagttaactctatatataacattttccatttatattttaatttttaatacttaattttcaaaatttgtttatttatattaattatcgttatcttttattagttcatttataaattatcgaatttaaaaaactttcttaatcgtacccatatcgtttccttttgtataaacggtctaaaatctccaatagattgccgtatttttaaatcattcctttcaacacgtcttaacctttgtataactttttcaaatttgttctcttcttcgtgaaatatccttaattccctaaaattcataaaatctgtagaatctccattactttgcattgtggtatcgtctatccttatagtctctcccatggatgtttcatcttcagaaacattagaattatttattttataatcatatccattatcaacagatgaaaaaggtgtatgaacattcgagaaattgggagctatactaattatagaattggaaactatcgaccttccatgttcagattcataactattcattaaaggggttgattttgttttatttatttgattctttataatttcaggatcagggaatgatgttaacgtactattatctattaaatcaagcatcgatggacggtggattaactccattagtggacgttcatccgtcactgtggttgtggtattcactgacatttgacgatagtatattcttattaataacgtccgatcacagaaaaaaaaaacaataacttgttgatgttttataaatgacagaaatatgtctaagacgttttctatttttggtgtcgcgtaagcataatttttctttttagttccgactgaatttccattaaaattataggtggacatattacctaatcagccgaattgaatgtagatggatgtactctatgataaatttgttaatgatttatattattatatgagttactaaaactataaagaatattgcacaaaaataacgacgtatggaaagtaaataaaagaatgtaaagttttcaaattaatttctaaaataaaagaacagttaaaaacaaattaaatttataataataatagagcaaatgaaatgatagctaaaaatgatccattttgaattttatttgcactaccatcgtagatagattctggggtatcaggaattggttgagaaactgaaactgaagagcttggttgttcaacaataggtggaattgtgaatgaagtagcactagattgtggttttgaacttgatgaaagtgtggttggttctggggtagatggagtacttgattcagataaaatagttggagtgtttggagtagttggttcagctggagtagttggtgttgttggttcagtaggagtggttgaagtagttggttcggttggagtggttggtgctggagcacttggttttggggtagttggaacaactggaacagatgattcagtagtttgagcagtagatgatggagtaaataaagtactttctaatgatgaaccataagatgatggaatagtagtagatgataatgtagtaactgaagtagttgaggatttagtacatttattatctgaacaatgagtagttgtgacagtgacagttgattcagaagtataagtatgagtacttgggatatatgatgatgatgaagatgaatttgatggacaatcgacagttggtacaacaaagttagttaattctacagttgtagtaataccaccagtagtaattgtttcagtgacagttgatggaccaaatgaaccagtaacatcagttggcattgaacatgaagtagttgttaaccaaactaattgaccttcaattgattttgaaataaagccttggatacatgatgcttgctcagtaacaaattcacaattagtaattggaacagaaagagtagttgggtatggagtactagatgaagttgggatggatgatgatgaacttgaaattgatgatggtgctgatgatggtgctgatgatggtgctgatgatggtgctgatgatggtgctgatgatggtgctgatgatggtgctgatgatggaacatttgatggtgtagttgatggaacggttgatggtgtagttgatggaactgttgatggtgctgatgaaggaacaattgatgatactgaggatggtactgatggtgatggtgctaatgatgatggggtggtggttggacaaacaaagcttggaacaataccatttgagactgtgatgacagtagtagtaatttcatttgaataagtggttgctgatggagtattaacaaatgagccggttaaaccatctggaacatcacaagaagtggtgatgactggaacagtggagtcaccaacaatgacattagtggtaccagtagtacaagtggcttgctgagtggagctagaacaatcggtaatgatagttgtgattgtggttggtggagcggttgatgaagatgatgaagatgatgtagaagatgtagaagatgaagatgatgaggatgatgaggatgatgaggatgatgaggatgatgaggatgatgaggatgatgaggatgatgaggatgatgaggatgatgaggatgatgaggatgatgaggatgatgaggatgatgaggatgatgaggatgatgaggatgatgaggatgatgaggaggttggacaaacaaaacttggaataataccgtttgaaactgtgatgacagtagtagtaatttcatttgaataagtggttgctgatggggtattaacaaatgagccggttaaaccatctggaacatcacaagaagtggtgatgactgggacagtggagtcaccaacaatgacattagtggtaccggtggtacaagttgcttgttgagtggagcttgaacagtcagtaatcaatgtggtgatagtagttggtggaactgatgatgatgaggatgatgttgatgtagaagttgaagatgaagatgatgggcaaacaaagcttggaacaataccatttgaaactgtgatgacagtagtagtaatttcatttgaataagtggttgctgatggggtattaacaaatgagccggttaaaccatctggaacatcacaagaagtggtaatgactggaacagtggagtcaccaacaatgacattagtggtaccagtagtacaagtggcttgttgagtggagctggaacaatcagtgatcaattgtggtaatggtagttggtggaactgatgatgatgaggatgaagatgatatagaagatgaagatgatgttgaagttgaagaagatgaggttgaagtaactgtatcagtaattggacaatatgtggtgacaagccttgttacaccactaacaacaacttcagaagtagttagatatgattgaataacttcttccttaaatgagagggattcataagtagtgatagtagttggagcaccatttacatcagaagtgtaagtagttaaaacattcggaattgctgtagtttcacaaacatcataatagcaagtagtagttggaataaaagtatattgtgaagtggaagctggatctaatttgtaaatattaacaatgaatctttcataaagcatttgaggacctccagcaagaacaccaattggaacagagaaaacaccgtattgaggataagtaagagatggagagacatatctgacaaaagaaccatcatttgggtttgaagttaagtttgcttctaaaaaccaattagatccaagatcttcataatcagctggatcaaaaggggtacaatcagtatcagaagtacattggtaatatgtactatgttcatttatatcccaaagataagtacctggaacatcaatttgataaatgaaaagataatcaaatggagatcttgcggttggaacatcaatttgaattctattgtcgttggtaactgtaacttcataaccatctgttgggccaactgcgttggcagctgccgcaaacattgcagtaaataatgttgtgctaaaaatcttgttaaacaacattgcttattgatcaaaaagtttttttttttgttgaaagaaacaacaaataaaataaagtaaaaaaagaaaaccaagtcttttaaaataacttcagaaccaaaggaaaactccatatgacaagtaacttgaacaattaattttggaaaataggatcagtttaagtagctttgaaaaatttcgtatttaagaatgaatttgaagttctccgtgtttcatgttgttgatacaaggaagaaaataagaaacaacaataacgccgaaataattcactaataagaatttatgtgaatcgttacttaattaggaactcaaaggtaaatttttaacagatcggagtattttgatgcttctcagagaacaagatttcaaaatagaagtaatttctgaatttcataatcattcctttgacttcctgaataggaaatgttgataatttttttgaaaaatgtgatgcatctttttgagtttttttgatgcttttgtgacaaattaatacatcagcgatcttcagctaagtacttattgtacatcttagcctggtgtttattaaagtgtgtaaaaattgacgaaaaaaacatataaaaaaggtactaccccatgatgattatgtgaaatctttgaaacaatacgaaaacaaagccgatttaatgatgcaattgagatcacgatttttccatattatgattatatgttctattgttctatctttagaactaaactatcataactgggcagtagttttgtggtttcgtcattggtttgatatggataaatatttagttgaatgaattccacttcaggtttattttgtcaaactgcactgtgtatatatatacatatatatatataaaccatatagtcaagtaaattgaatctatataactagttttcggaattatgatattcaataacttacaacggtgcagcagttcaagtaacccgttgcgtttgaataaccccgaaacctttttttttcaaattggatgtatgcaggtaaaatttctgtcttttgtttcatcactcaatgattacttttttgtgacatgtggctgtcatgttaatacgtagtgcagatataggtcaattgttgacatagtataataaattttaataatgtcatttcattattcagttcatcaagatgaaggataatacataaagtgattctgttttttcaccgccgcagacttttggaaaaacacatgtatatgaaaaatgcggctgaaatgatgaaagtacgtgctatacatcgtagttagtggatataaacttgttctttagaacgtacaaaggatgaaaaatgtcatgttaaatgtgtagtaaatacaatatatatagtgtagtttatattataaatgataaggaatgtaaagattaatagtcttgtaattctttattggtcatttccaatctaatccaattacttaaacaattttgatcgtgaacatcttctggagcaaaataacctgaatcttccggagcactacatttatcagaatttggaatatttttataaggagaatgatgataacctatatctctaaaccaatgaattttagatctatcttcaaataaacctaaaccaacagaatgaacaggagcatcaccccatctttcataatagaaaccaccagcttcatctaaagcatccatccaagctgaataagcttctcctctatagaaatccatatcaccaatttcgaaatttgaccaaaaatgacaagttgaataaccaccagttatttgattataatcaggatgttgtacattttcagttaaccaacggaaagcaccatttggatgagcatattgaggatttttttcaaggaattctaaagtaacaggccataaagtttcaacagttaaaggattatcatataatgaaattgtaaaaccataagttttattattatcttccataaatttgaataaatcataatcaatattacaataataatcagttgcaggttcaaatctccaataatatctaaattgttgtaatctttccattttatagaaataacctgaattaaatctacacatattatgataagaaactttatcaatatattgaacacctttttcctttaatttattaattttttcagtttcaatattttcatcaatattagcaggtttattccacatatcaggtggtataacttcaaaatagcaatcactaactgtatgtcttttgattgtatctttaaattcttgagtgaaaggttcatcattaataaaagtataaggataatggaatttatgattccaatgagcttctaattgtcttaaagtataaacaatatcttgtaattcttgatttctaactaaagttaataaagttgcattagctcttggatattcatcctttgataaaactttaacattaccattattatctttaaattcattataagttaattttgaaaattttggttcagtaattctctttgaataaacttctctgaaaaaatccatattttctttacttatatcttcaccaatatttttaaataaagttttatcaaaagttaaagcttttaaaagttgaggccaagttaatggttcatgattagatgaagtttcagtattttctgattctgcaattaatttattattatattgaatacgataatcagatacttgattaaacagatcatttgcatcaaaatttgaaatattagacgaatgatttgtaatgatatataaaatagttaaaaaggaaattgcaacaatgacccatcgagtcccacttcttgataggaatagcattattagcaaaactatttgatatctaataaatgagaaaagaactatcaaaagaacgtaaacaaaaaaaaatgataagtaaaatcagtaatcaatgaaaacatgattctcttcgaacctggcatgaatatgaaatgaaaaacacgatatatagtgatagcacaataaataagtactatattaaaataagtcgttgcgacacgtaaaaattattttataataataaataaattattaatggtgtactggaggaagggtagttgtattacgtaattggtttttatttgccctcctcttattgagggctcattcaatattaatatagttgatctttaatttccaatggcaatagttatatatagtgatgaattatacttattttttaaagtaaagcaataaggacaagactgtaatgtatagactttctaccactttgataggtcatgaggatgatgtgaaatcattggcttttttagatgatgattcaattgtttcagcttcaagagattcaactgttagaatttggaatagaattaatcacaatttaaaagatttcgatcaatcgataattaactttaaatcaagtaagtttgtcaattcattagctatttatagatacaacaatgaaaatttaattgtaagtgcaggtagtgataatataattaatttaacttcacctgatgcaatttatccaaattttaatgataatgataatgatgaattttgtttaattggtcatacttccaatatttgttcattagacactttacataatctcattattagtggttcttgggattcaactgctaaagtttgggataaaaatactggtgaaattctttatgatttaaaaggtcatgaacattcagtttggagtgcaaaattcttagattcaaatacttttattacttgtagtgctgatagaacaatcaaaaaatgggttaagaataaacaagttaaatcttttattgctcatgatgatgttgtacgtgatataatagtattacctaatggtgattttgcatcttgctcaaatgatttaactattaaaatttgggattctgaaactttccaaaataaagcaattttaactggtcatccaaagttttatttattctctctctctttctatcaaatggtgatatagttagttgtggtgaggatagatctgttagaatttggagagattatcaatgtattcaaatcattacacttccttgtgtctctgtttggaaaacaatcgctttaaataatgatgatattgctattgcttcttctgataaaacaataagaatctttaccaaggatgcttcaagatttgcaacagaaaaagaacaatcattatttttaagtgaactagaggaatcttcaattgataaaactttgtataatgatgttaataagaatgatgttcaaagtgtagattcattaaataatgaaagtgccactttagagggtgaaacaaaattagtcaagaataaaagtggtacattagaactctatcaatggacaaataggcaatggattaagataggacaaattgcaagctcttcagaggatagaccaaagcaattctataatggagggttttatgattatgtttttgatatagatattgaagatggtaaacctccattgaaactgccagttaatcttactgatgatccatatgaggtatcagagaagtttttagagaaaaataatttaccaggtgaatacttacaacaaatggtacagttcttattaacaaatgctgaaggtatcggtgctaaatcacaaattgctactaccacaacctcttccaataacacaactaccaaaactacatcaaatattttaccacaaacaaaatacttatcattcgaaaaattagatctaaataaattgataaatgcttttaagaaattaaattccaaacaaccagaggataagcaattagatgttgacttagaaacattattcaattgtgaaaactactcaaagattcaagaatctgcaatggaaatgatgtcatattgggatgataattctaaactattagcttttgatatacttagagttattattactaaaattaaaccaaatgaaaatttatttccagttattagaactggacttgaatcaaacattggtaaaattcaaatgatgactatcaggattttaataaatacatttagtgctaaacaatggggtgaaccaatgatgttagatgctgatatattagatattattttcactgaattgttatatgaaaatttgaataaggatgccacctttttgccaattactgtttctaccttaatattgaattattccgttttagtaaataaattttcaataaatacaatttaccataaactattaaaaataatcaagaaggttttatctctatcaaacctattaaatgatgatgaatcgctttacagattaatagttgcaatcggaacattgaatcactataagaaaattgataatttatctgaatatctttctgcctttgcaaacaaaaacagtgaaaggtttgaattaatcaaaaaagacatataatttatccattaatcatatatttattaaatactttatatactttataacaattttttacattttaatttttaatgtcttagataattttcttttccttgaattgtttaacgacatgatcataaacttcatcaacaggttcattacaattaattttaataactttgttttgatcatcaaaatattcaacaacaggcatacttgtttcaacaaaagttttaaatctctttttaatactttctaaattatcatcacttctaccagaagttttacctctatttaataatctttcaagcataatttgttcaggacattcaaaatacaaaactaatttaccctcagatacactgttttcaaaacttatagcttgatccatctttcttgggaaaccatcaatcaaaaaatttcttaaacctttattatattctttaacaattgcatttttcaataatttaattgtaatctcttgtggtacaattaaaccttcttttatataatgatcaattaattcaccaaattcactacctggagtattcttctcttcacgtaataaatcacctgcacttaaatgaacaaatttataatttttaactaatttaccacattgagtacctttacctgaacctgggccacctaaaacgaaaacaacattgattttatcaggatagtcctttgatgggaataatggatttgcaattattgttgaattagttggatcaactgatgcagttggtggttttgtattattatttgtattataaattgttaaaccaattgctgctaaacctaataatgttaatggaatgaaatgattggttttatttgatccaccacctgttgcgtatgaacgaatttgtggtaaaggtttaagaaatttagctgatgatttcagtgatcctgttgatgatcttaataagtttcttgtaagcatttgtccttggaatttaaaagattaaagtataagtttacttagaagcttatattacatgcgaattaacattgatcatcaatattttttttctacatgttggaaaatttacagtgtataaaatatcttgcgagtttaactggtttttacaatgactacttatactgtcccctccttgaataataagcttcaataattagtgtaaagagataaaaataaataatacataaataagaaagacaagactagagaagagaaggaatggcatatttttttcagtttatgaatgatattccaccaattttaatacttcctttttttttatctgtagtatgtttttattttgtagtgtataatataatatataaaaatattggtatgaataaataagaatcaaaattaaaggttaataatataaataagtttagaattcattaatgtatttttcgtgtttttttcttttaataaacgttaactttgattaccatcttaacatagacatatcatttctgattctgttgtaatcgaataaagcttcaatttgaccattaccagcaactgcgatatcttgatcatataagtatttttgagcccaagctttaacagcagctggggtaacagcatcaatttcagctgaaatttcagcttctgatggtacataacctaaagcgaaagcttgagttgctaatttttcagataaagaaactggacattcagctggttttaataagtttaattttaattctgcctttgcctttgagaattcaatttcattgacagtaccagttgagaatctattccaattctttaaagcaaaatgaattgtttcatcataattaccaacattatgagaagcgaaataaccaccccataaaccaacatcagaataagctaattggaaatgatcgaatgaatcaattaaatgatattcttctaagaattgagctaaagttgaaccaacgaatggagagaatggagaattaataccagcatatgaaccattaatttgagctgcgaactaaaccagtatagaatgaagcagaatcagttaaacctggagttaaaacagagattgcagcatgagcttgaggtaaattatcatctcttaatctaatatcagaacctaagaaagaagttggttcaaatggagtttttgcaccggttgggattggtaattcagatgctaatttaactaaatcatcatgagaaatttcatcaccaactgcaacgattgataagtttgaagaaactaaatttttttgtaaataagattttaaatcttcagataataaaatttctaaagattcagatttaccatattttggtaaagcaagagaagtaccttggaaagcggtaccaatcatatgttcaataaccatatcctttggagaattttcgaaagcttcagtaactgcaattgatttttccttttgaattgataaattagttgaatcattaataattgattctaattgtgagaaagtatttttaacagagttaattgcaccagaagcattacctgaaggataaacagctgataataaaccagtaacttccttttgatttgatgaataatatttaacaccttcatttgtaagagcatctttagatgattttgaagaagtaattaaattacctaataaagaggaaatacctgaattataaggattttcagatcttgaaccagaatttaaataaaaaccaattgaagattttgaagttgttgaaggtttattaatgatagtaataccattacctaattttgagacattagcctttgataattgttttgaagaagttgaaaataatctctttgaaagcatacttttgaacctattaatgaagagagtgtccttaatctaataaaacaatccaaaaatatattttagaaatatcagatgcaaatatcagttaatattcaatttaatgttgtcaaagcgaaaataattggaatgataattttcaagaggtaaattttgaaccaatgagaagtttgcgaatttatatcactattttggatggtatattaatggtatattatgtcagcagcgtcggtgggtcggtgtgctagagcggtcgatgcgtcgctttgattttttttttgattttttttgtttttcatgaattttcactattttaggaatttttcacctttccacgacatgaattggtgttaatagaggttgtgagtgatatagttgaggagaaagctttcatttaatcagcctaagcaaatataatcatgtcagtatctacatcacaagctgcatctgctgctgcaaatgctcttaaacttacaactagaagtaaaccaatgagtcgattcccacatccagtttcattaccatcaacatttgttaatacaagagttatgagagatcattttaagagacaaatgtttcaacaaaatgaagttacatcaagggcattaaaatttattgcaagaaatagtgttttaccacaaaaagttagattagaggcacaattacaattaaatgcaatgccaaattatacaagagcaaatcaattaaagggtagatgtgttgattctggtagaggtaaaggtgttattagagattttagattatgtagatatcaatttagaatgcaagcattacaaggtttattaccaggtgttagaaaaggtgtttggtaagatatttatggtaatgtttctttctctctcttgtgtatataggtaattatatagtattaataatgtttaattaaattaatgaaaaaaattataaaattatgaaattataaaatctgaaaatcttaaaattcaaataatatattatatatataagtagggattgatctagctaatgtcaagcattagaaaacttgaaaaagttaagtaaaagaagtgaaatgtaatgagttattagaaaaggtgatctttgaatggtaatatagtgtagtataggtatagtttttgaaattgcttatatgataatataattaacttgaattaagcattataagcaacttttttaacttcagaagagaaactattattttcagcttcactttcaggacatgattccggtttaccatcactatacataatttcatgtcttgtctttaaatgttctggatctttcttaataataaatgttctatattcagcaaatgttttaaatgaacctgaattaatagctgaagaattatgtcttgcaaaagctgaagctgcaacatttgcgagtcttaaagcagatgaaaatgatctgatagctattctttgatttgcaagcattttaatttgtagtgtagtgtagtttcgtttagtttaatttaaagtttgtattcctttgtgttacagagagaataaaatagaagaatagagtaaagaggagagtataaaatagaagttataatcagggcaaagagaaaagtaaggaatcagatcccaatttatagaaccatgtgcataaaattaacagtcataacaattataattataatatgattaatattgatgaatagaaataaaataaatcatgtgagaacattaaaataaataaattaagacacttttaataatgatgacccactctgacactccgatagacaatagattgtacaaaatagataaaggatataaagaaatttgaataaaatacaccccccccccctcttttaacggatataaagaagggtcactcttttaatttctttttgtttctttttgtttgcttatctcggactttctctttccattcttattgtggcgttccgtgtttatacgattggtaaccttagcgggttgacgtcaatcttccgacccgtgttcacccgtgtcacgtgatgggtatttttttaaaaagtattttgcttacttacatgaaatatcatcgattgtagaattatcgattagaatcgagtagaaagcaaactactacatgcaagtaattcatcatggatcgttatgataggcaagtacgtctttggaatactaatggacaaaatgctctttctaattcctctgtctgtttcataaatatatcctcacctgctactgaaacaatgaaaaatataattttaccgggtataaattcaattacaataattgattctcaatcaactataccgtcaaatgactccttggaattacttaaattaaataatcttaaatctaattatttttatgatattaataattctcattctttcaaatatattgctcaaaatatcgcatataatttatcaaatcttaaccctgatgttaaatcaattaatgttttaactgatccactccaatctttcatttcacaaggtgataatttttggaaccaattcgattgtgttgtttattcatttgatgctcaaacagatccctatatagatctaattatcagaaatattatggcatttaaatatacccctcgttaaattatcatcaattggattttactcttattatactgttcaatttaatcagctcaatataattgaaactcatcaaaatgatttagtggatttacgtttagattctccttgggatgaattaatatcctatattaataatatagatatatcacatgtttctaatcccaatgaatatttcaaatatccttatactgtaatactaattaaattatatcaagatactaaacaaaaatttgcgaaaaaactcactactaaaaaaataagacaagaaattgataaattatttctaactcgtgatgaattaaatttattagaagcttataataaagcttatttattaatgaaaaattcatcggaattaagtgaaaatttaaaggaattgtttaataatatacccattgaattaacttttgatacttcacttttctggattttggtttcctctttgaaaaagttttacgataaatataatcaattacccctaagtggggtattacctgatatggaatcagattcagaaaaatataaagaattaaaggaaatttatcgtagaaaatttatctctgataaagaatttatttactttgaatcaatgcaattgttaaattcacttaacagatcaccatctgaacttaaagataatgatcatcttatcacattatttgttaaaaactgtaaatatctgaaaataattaatggatcaaaacataaaaatctatcagaaaaagtattaaaacaagtacctaataataataatatggtattataccttgctttccaaattcttgaaaaattcattaaattagaacaacgttatcctaatcaaaatgataaatctaatttaagaacattagcagtatcgtatctatgcagtgaaaaaacattaccatcattcccagatggtttagataaatttcttgatgaaatttcaagatattcaggaattgaaattcataatatttctgccgttattggtggtataactggtcaagaaattattaaattattaactaatcaatatatacctgtcaataattcattggtttttgatggtattagtggtaaaacacattcatttaaactttgatagtaaaagtaaatagtaaaactacctcgtatagctcgtataatgaaattttcaaattcgcatattggcacttagtctacatgggacattaagcaacttggcattgagatattggttatagtcctttcatatatatatatataaggaccaacacttgtactatagacaatgccatattctgatgagataggtctcactccaacggatttcagtaaatggagattaaatacaacaaaactgggcgctcaaagatgggaatttattgatgataaaaatattcatatcaatgaacaatcaaatttaacaaaatatttacttgaaactgatgatttccaaccaccaaaacttcaatttgaaattccaaatactattaatgaagcattacataatggagcaactttctttaaatcaattcaagatgaaaattcaggtacttggccagttcaatataaaggtccaatgtttatgacaattggttatattgcatgttgttattttactaaaactttaatacctgatcatgaaaaacgtgaattaattagatatattgtaaatactgctcatccagttgatggtggttgggggttacatgaaattgataaatcaacttgttttggtactactattaattacgtaatcttaagaatattaggattaccatcttcacatccagtttgtgttaaagcattgaaaactttacataaattaggtggtgcaattggttgtcctcattgggggaaggcatggttagctgttttaaacttatatgattgggatggtgttaatcctgcaccaactgaattatttgcattaccttattcaataccaattcatccaatgaaatggtgggttcatacaagagcaatttatataccattgggatatttatcaactgctaaaatacattgtgaattagatccattattggaagagataaggtcggaaatatttgttaaaccttatgatcaaatcgattttaaatcaaatagaaataatgtatgtggtgttgatttatattatcctcatactaaacttttaaatataatgaataatattatagtattttatgaaaattacataagacctaaatggttattagattattccaataaaaaagcatttgatttaattatcaaagaattacaaaatacagaatatttaggaattgcaccagttagtgcagcatttcaaacaatcgtactttatcatgttcaaggtccaaccggtgatgattatttgaaaagtttcaatagattaagtgaaacgttatttctaggtaaacaaggtttaacagttatgggtacaaatggttcgcaagtctgggattgtgcgtttttcatacaatattattttaatgcaggattggctgaattgcctgaattttatcatgttattgaaaactctttcaaatttttaattaattcacaatttgatacggaatgtgttgaaggatcattcagagataaaagaaagggtgcatggccattttcaactaaggaacaaggatacactgtttctgattgtacagcagaatctatcaaagcaatagttatggttatgaattctaaacattttgaaaaattacattcgttgtatgatataaataaattaaatgatgcaattgatgtacttttaacactacaaaatgttggaagttataaatttggttcattttcaacatatgaacaaattaaggcaactcctatgttagaattaataaatcctgcagaagttttcggaaatattatggttgaatatccatatgtggaatgtaccgattcatctgttcttggtttagcttattttaataaatattccacatatagaaaagatgatattaagttaactataaagagagcaactgattatataatagatgcacaagatgttgatggttcatggtatggttgttggggtgtttgtttcacatatgctggaatgtttgctttagaatcattacatgaaattaatcttaattatgaaaatagtgaagtggttagaaaaggttgtgattttcttgttaaaagacaattagaagatggtggttggggtgaatcaatgaaaagttcagaaactcatacttatgtgacaacattagaatctttggttgttcaaacagcttgggtggttattggattaatcttggctgattatcctgaaaaagatgttattagaagaggtattgatttgataattaaacgtcaattgggaactggtgaatggaagtttgaatccgttgaaggtgtgtttaatcattcatgttcaattgaatatccaaattataaattcttattcccaattaaagcacttggtctattacgttcaaaaatatggtgatgaaccaatttaagtgaagaatattttaaaacttagttctacctttacctttcttggataatcttgtctctcttcttagcttttgtgtattaccaattaaattctcgatgtatgatgtaaatatttcattatcatgcttcacttctgtagtatgctcattccatactgagagtaaatcaagcaattcaattttatgttggttcaattgctccaaataatctgcagattcttcatctgatagtaactcatttttgatttttgaaataattgagctagtattgcttagtttttcactgtattcttctcttttctttgatatacccaacgactcgaattttggaacttgttctagtattttagcaatatcttcatccagcaaaacagtctcttcaatatcatacaattgtttggtacttgtacttccagctgagattgattctcttttggtgacatctatatcttgaggaatttctaaattcagcaacaaagtgtttataaatcatgctttgtttccatatggtgggttgggtgacagtatattcgtcctctcctgtcagtctttccagtatttgtttagctctttcatctagctggaaagtatcattattgttatcagattgttcaggtagtaatgtatctttcagtatattatcaattagtccacttattttagcatcgtcatcgtctaattttccttcaaagaacgatatgtttttgattgaaatttcatgatgtggtgtgtctgattcaactaaatcatttgattgattgtcggtttcttctaattgatcaacttcttcaaaatcaccgaaatcatcatcactgggtactaactcacttgtgttatcaatttcatgttcaattgtgttctctacttcctccattgctgcttgtgtaaaagaaaaagttatatgattcacctatagcttcgaaaacaaaaaaaacggtgtgctgggttttgaagtgatgggctttttcctgcccaacccatctttttcaatgggagtcttgttgatacaataaaaatgttatcacttattaataaaactatacaagtatggttaatctttagaaaaatatatatatatatatataaactgtaaagaaagatatcaagctttatcatgtttcttcttgaaaataccaccaattgaacctgcaccatgtaacgctttacctccaatcttacctgcaactcctaaaacttttccagttccactagcacctgtactaataagttttcctgcaccatctacagccagatttgatgcgttaggtaacgctttctcagcactaataatagtatgatattctggttcaaatctcataccaataacaatagtacctgcatatgctctatcatcagaaacgagttttatttcatagtcaatcgtcttatcaacaaatggatcaatagccttaagtgcaaatttataatcaccgattttatcatcttgttcaacaccgaaatcccaatcactacacttaactcttaaaattgattgaacacgagaatcaatattaatactagtggattcattccattcaggttcaagtgttttctttatagttttggtatgataaaattcgtcaccatttaaatataattttacaaatggatcagatttaccattagaatctttggataataattcaaaccctcttttaatttcgaggtataatgtacctgaattaccaatagaagtctgcgggtggtaatttggaaatttgagcaggcaaaaatctacttgaaagtttgattgtattttctccaactttcattgatgtgaccttatcatatgagttttctaagaaagagtgtgtagaaactgtgacttcatttcctgttgttttcaaaagattttgattaggtttttcagcaactctaaaagtaacaacagaatacttttgtaattctttaactaagaaatcaaatgttgctttcaaatcaacttttggagaaaccttcgtctcataagcagaatgacctctcttatcaaagaaaacttggaaatatcctgtcgatgtgaaatttgaacctaaaaatgtgataataacaacaccagaattgtactttggaatattttccaagtgtaaaacattttgagttttaattgccattgcatcatgaatgtcattctttttgttctcgtcattcctcttcagttttaacatctttatctttgttttcctcttcttcaatttttttcaccattatttcagtttcttccttctctctttcaagctcttttggtgtaatcattttacttacaggatagaaagaaagcgagtatgaaacagtacctcttgcacctttccttttatggaataatcttgcagttttcatatctgatgtagtctcaatagcttcacccttatcatcataatcaataaactcatttaatctcaattggaatgatcctaaagttctatcttgaccatgtctttcaacatccataccttcgattgtaactctttggttcacagaagaaataggaatgtacaacgattcataatatttaggattaacagtggattgcattgttaatgttctagctctctgtataccattgattaaaattctaatatatggatcaatgacaccaattttttccaaattgattaaaccatctgccttttcaatataaactctcaaaacaccgatagggtcattataaccaatagcaccaggaacacctaagatcttaactgagttccagttacatgatataccaacttcacctacaccacttgacattgtaaaccacggatttccaacatacgatgcatcgataatatcaaccaaacgtaaagtatgtgatccaataatttcatccactttcttacctttttctcttaaaataatacgaatttttgcctttgatctatcagtaaatgacctcctcaaatttttcattccattttgcagaagaagcatttttaacaatcttcgattctaatttcttttcacttaagatataaacttgagcatatacagactttttctcctcttcattctcagtgaaatttcttgcaccaatcaattcaatcttagcaatacctgtattataatctggtggtgggctgaatgaaccatctggtaattttgaaccttgaagagatttcattaatttgatatcaaaattaatagtccctgcaggatgattatttcttaaaataggaatggaaacattgtttaactgttgttttgacatcaagtcttccaagtcaaacaaagcagcacccataaacttatcttttctgccatctgacaaattctcatcgtataattttatagctaatggttcagatgatgagtttaaaataattctgagggtttcattataatctgggttaatggtatcattaacaatttttgtttttgcaagtacttcatcagtaaaaccaaaggtaaagtaaggatcaattgtattgttgaaagtatcagcaccgtgtaaatctctggcattcttaatatttaattctaaaacacctaaagccccatttgcaccattaccatttaataactgttcaagatttaattgaaatgatagaggagaaaaaagcattggaccaacatattttttgatcatttcctttacaagtaagtataaaccaggaattgcaaataattcaaaaccaaaaatagtttcaccacctgcaggttttgcaataaagtcaatatcgggagtgtcagttaaagaaacattgatagtttgaatatgaggaaagttttccatcattcttaatctaaccttagcattggctttgaaggaaacgtcactaacataaactgggatagtaaaaccaaacagcttagccttaataaggatcatttgattaactttgtttttcatttgtttttgagttgaatcttccagtgcatttggaatcattgaaaatgtccaatccataacagtaacatcattaccagtacgatctaaagttctaactttatcgattctaggaggtttagtacctaaagtcattgagtgaatccaaagttcttgaataaaagcggggattgtatccaattcagcaagcattgggttaacaatatcagtgatttgttgagaaattgaaggttcaagaaatgcccaatatttatccaaaaggacatttaaccagtccatagattcaaaatcatcttcaattttatggacagaaaactctttttgagtttgtaatcttaatttcaatctgtattttcttattgatgaacgataatataatgcagcagtaagtgtaattaagaaaacaaatcctaatgaaaatttgaattttcccaatatagttgataaaaaacttgataagataatgattgcaataccatgataccaatcaccatataaaaattcgggaagatattgatccagagttgtagcccttgtaagaagatccataatttcatcaacagaactaagatcgtatgatgaatcataaccagtaacttctttccaacctctaaatgaagctgcatgttcaggttctctttttggcttctttttcttccaatttctttctcaatttcttaccaattgacctacttacgggaccagtaagatttaaacgatagtgttggctcgatgttcctatcagtatcatttgttttaactttactaaaggaaacattcgactgatgagaaagtttccttgccaatgggatttctcctggagacaattttccatctaacgtctgtgtatcagtagcagacattgagtgacttagatagaatcaatgataatcagaaatgtgttaaactaattgaaactaaaccaaattttaaggggaaaggaatgaagcttgagtagcaccaaaacaaagtttcccgaaaaattaattaaatattactataccgtttcaccaattttctgtcaaacaatagctttaattaaggaatcgtgaaaaagcttcgctatgggaaattttaccaatggctttgaagctctcgttttttaggagtgttgataatttttttgaggatgtatcttgttgtttttttctacaaggggttagtatcttatcagaaagagtgatattactggtaatggcatcggaacatcgtttggacacatccatttatctgctgcagaactgtctggtatctttggaagatgcagtaagtgagatacagaagcagacaaagtctgttggagtattgcagaaaactttagagtctaagatgctcttcgatgttttacctgaacgtctaatcttacagaggcctttaaaaataaggaaaatggtgaaacccatattagagaaagataacaaagtacttgatggaatggttgaaaagtgcaaaaagaaaaagctggtcttagaacaacaacaaaaaatacttaaattaaaatgggagacaattaatagttacaagtcctagtgattggtaagttatattgtataaaaggttataaaaaagtgtaaattaatagatattagtcaagttttctcgtatacgtaaaagtgtcttttcaatactctctaattttatactaatggacaataaaataggatccgatgtcactacttcacatttatcagcaacttttacaacaaaaggccggcttttgtcatcgatatatgtgaaggattcctccaaatatgtatatgcacttttaatcaatgtagataacgatgggtcattattcgaagtgaatatgtgttttattgtactagtgaatccagcttcttcctggtcttcatgatctaagtcaggatgatccttcctccaatccaaatatttttgatattcttcaacaatgattttgttgaccggtattccacgtttttttgctatttgtttcctcacaatatcagcaaaagataatctatgtgcaggatcaattatcatactccatggttttttctcaacaacatttagacttcggaattccacactaagctcaccattattcactagaaagtccaaaactccatttttgggtaattgtggttcaaataatgtaccattcaccctgtatgatgggaattgatacaatggatcggcattcattagtgatttacgagcattattaacatgagaacaaagcatatccatgtatcttataaaaagatctatatcattaccattcttcttgttttctccaatcttatcgatattcgataatgcattcatgatggcatcatgacaatccaatagctgtctaatgactataaattgtgaatcgatcaatttgaattgtgattttttccctccattgaaaagcttagaattaataatcaaatgcaactctgttatcttaaaattctctctagtaattgtccccttgataacttcagattgatgtgatgacaatggtaatttataaggtgttgaatcagtttcgtccaaatgttcaacacatgatgtcaagacatctttcactgactctaattgggtatttattacttcatcaatgtaccatgagatctcatttttgttctgcttcttaacaagtcactttaatttcggtttcagagatctctttccttgggtataaacgtgtagacatgatgtccgatgatgaagtaaaaaaagaagttataggtctctctttgaaaagttcctattaatttttatgataggaagccctccctcaagagtttcattatgacgcgttaatttttgaaattttactccggtctctttgaaaaggcaagaggctcttcactctttttcttaacgttctttcaaacagtatctgtgattgtaacgatgttaaaacgaagtcgagagaatgaatctcttgacacagagtttgataaggataaagaaaacaggggggggttaccttataaaaatgatttaaaaaaacgtacatcattccaaaatttaacaccagaagcagttttacaaaatcatcctataaatcatatcataccaatacagtctatggtccctttgatagttccatatgatacaaatattccctctgataccatacttttttctcaagatgatgtaaatgataactcaactgaaaataactttttgagttcttatacatggaaatctgaacatcctgatttgaaatttctgaaatttaaacgtccaaccatacaaaataaccaaaatccacttgaaattaatgaaaccaatgctataatagatgaaatttctgggaatatcacagctgtctctaagtcagattatttgaagtgtagcatgcaatcaactaaaatggaattactttcaaataacaataattctgctagtatacacgaaagtgaaactgagaatgaaaacactttggaagtaataacggctttgattaattttcaagatactcctgctcctgatccagcgggagtacggaaagtctgatacggttgatgaaaatattgaaaaacctgacttcttatacgattcttcggtcactcaaaatgatttgattgtgggcgttgttaatgattttatcagtgatgttacaaaattacatgaaggatataatcatttgggtgaattctgcttctgatgatgatatttggatctcttacaacatgatttttcaaaatgaacaaaccattgctagtgtgaaatgtattgacttctatcaaaaccaaacttcttcaaatcaaatctcacgatatattaaccgctattgaccccagagtatactcgtggctatttaatatctgcatctcgacaattaaagagagttttcctatagattgggaggtcatttttacttcagaggacatatataatactggtgaatatcaaaattacattgaaacagtgattcaatgctgttcaatgattcttataatgtattcgaactctttaacagatcaaataacaaaacatgaaaacggtttatctacttgttacagatttgatttcaacatttggagtagttataaaaggtctttttcaaattgaggagtttattgaacttcctgatttttttattccaatcattaaatcttattctttaatgatcaatacattatgtgaaaacttaattttttcttccattcactgaaactctaattgcacgtcttgagtatatttcatttgacgctatttttgctgatatcacatacacaaaagatagaattaacctaaatattgctttagaagatttgaggtccgagtttgctcaactcattatttccatatacagaaagtatgaagatcaaagagctttcatatttaatgaaatagtggagaatattaatactttgaatccacttaaatcaaagtcaaaaaattataggttgaattgtggaattactgttcaattggtttcttatatgatactcagtcttattgaaatgtcattcaagttataccgaagattttgattattcaaagtgggaatatttgaatattgatcataaaacaaaagccaaaaattcacaattaaaagaaatgaatgaatcatattggaattctgttaactatcaatatgaatcaatgcaaaaagctgttaataattttgttaatagtttgttaagaaagatcattgctttatataccccaacactgagaaagatcattgagaatatatttgctgacatttttattatgatggaacttcctgaattttcttcttcaatcgtgtttttagattcaattttaacaaatgggttgagtttatgtaataattctggagactctgctttaactagtgcatatgctcttctgtttgaattgattgggacaatcggctccaaaattatgcaaataaaaggagaaggtaaaaatgttttgttgaacagtgatttagatatcaaatcattggaagaatcttcagataagtttaaaagagtaattttttatttgaagtttaaatacacaaatccagaactgtatcagttttacttaatgttatatttggttcaattgaataaattaaagggtagattggaggaaattgttacatcgaaaggtaatgaagttattggtgatcaaatgaaattgaagaaaaaactgcttaacaaagtttcagacactattttttctttcagagagattccctacatagaaaaagcatccaatgatcttgattcaatcacagaaatccaaataagagaaacattcaaagattcactattgagcacgcagtttatgaacagatataatgaagtgtttacatttattttgatgtcactgaatgatccaaaagctaaaactagaactctttcaataaaaactttaacgttacttatcaataaggaaccagaactattacaagatgaaaggttgaggaaaatgattaaacaaaagctggaggaatcgtttacgactgtcattgacgccacattagagcttttattaaaagttttagagttgaaacctgagtatataagtgagtactatgaaataatcatacagaaagtttctgagtcaagtattaatgtcaaaagaaagtcaattaatttaatctcatatatgtttaaaaatctagatgatattaaaatcaaagctaagttaatagtttccttactgggtcaacttgatgaggaggaagatagaatagttgatactgtttgttacaatttatgtgatttattacttttagaacttggtgaattgaaattagatgcagggagttcagattcggtattgtttcaaactaaagcagaacaaactatcagggtattatgtgatgttttcctctatggaactgcaagtattaatcaatttgaaagatttttagtggagaaggtgattcacaaaagtaagtttaataaaaacattaaagagatcttagatgcttctttggatgctttagttgactacatgttatcaatgattactgatttagaaacagttggtgttgagaatatatcaacagaatctataatgaaggtgttgtcttctttgattagatgcgatgaacaacttatctcacaacatcagttaattatcattcagccatatattgttaatgatgatttgtcaaatgagatttgctatcatgcattacaaattttgaaactagctctaaatcatcatcatacactaaatcacaactttgttgaagcgtgtaagacatcattgatggccagacttactaaattcaattccaaagaactggactctgctattcaatgtgtttggaaactatttttgattgatgacaatacacaaggggtgtcgaaggcatgtgtatcttcattaagaatgttgctgaagtttattaatgatttcaatgattcaggatctaatttcactccagctcctactatccccagactgttatatcttgttggaaactttgggaggtattgtgcttttgaaagggatcgtcaagtgtttgaagatgctaagctgggtctcagagaggatgaaccaatttctgttttcttgttgaaatatttgttaaagttttgtgattcttcaatagctccatatataagaaagattgctatcaaaaacaccttgaatgtatgtgtttcacatcctaaattattttttactgttccagtgtctcaactagttgattcagtattcaagaagactgatctcattctcaaaaatattgtcattggctctcttttaacccttctggaaaatgaagaacaaaaaatgatacaaaaaaatggattagggtgtcaaacgctcaagttcaattaaattagatgttgctgttttccatggtaactcgtccgaatatgttaatgatgggatttgctcaacattagttcaaaaatacatgcctaatattttaaatatctgcttaatgaagaataatgaagttgcgatgaattcaattgagtttttaaggatgattattaaatttgggttttcgaatccaaaagtttgtttccctacagtagttgcattggaatgttctaggtcgaaatatattaaacaagttgcaattgagatgcataagtttttgtttgaaaaatttgaaagtttgatggaatcaacatactgggaagccttcaagaaaactattggatatgtcatgattttatactcattagatgagcttaaaagctgtgattcgtttttgagaacatttttcagaatcgttaaaagtcgtaagagtaaacaaagaagtgaaaaatttattcaatcaatacttagagtaataggtaatattagtatgcacaaacttcaaaaggtcgataaggaaggtttgaggttcattgagtatcaaatagtatttttatgcattaatatcaatgaaatagaatttgcatcacagctagaagttttaaccattattagttttattgaaaagatcattctgacagaagaaggaaatgtgtttggaagtcaatttaaacttatgatggatctgtttgatgatgatgacgataacaagtacagaggcgttgtgattggtaaatttttagtttcacttaattgccttgttaaatgtttgacaaaaaagtattcgatctcttcagatttaatcttgaaatttcaagaaagtgttgataaaaaagaatttcaagtttctgttggcacaccagaaccatgtgtattttttgaaggtgaaattaaaaaagtactttctgatacaagcatggatctaactttactacataataaattgctggaatttaataagaattaacttaatatatagagtttaagaaaaattttatagctaaaagataaattaaatattcgaaaggaaccaaggttggaaatcttccctatttttaatgaaatcacgaataacacttttctttaaatcctttaatttaccttcgctacagaaatctttcaaagattctggctcacaagtgtaaagaccaggtaattcattcaaaattttataagccagttgaatttcatctagttgttccctttctgatatttgtgagttggtaattgtaccattttcttcattatcataataatctctatcttcgctaatttcacctactttcagattaatgaaaactaacaggtattgagccaaatcgtgtgttaatattgtaaatccattcattgtaacctttaaatggcttaaatggtttatcaatgcagataagaaataatgagaaatttcggaaacaaatttcaccttgagcttagaatcgtagtttaattctgtaattgcacttgttattactttctctaaaaatgatgtcataagctttgatgtttctgttctatcagtttcacttgcagtactataatcgttgagtggttgttttgataagatcaaatcaattttattctcaataatgttcaaagtctctttaaagatgatattgataccaatttcaacgttctggtaaaacaagttaaaagaatcagtaataagatttaaatcattttcatttgtaagtaaagggtaaaatgatttctttacaacagttgacagaagatataattgtaaaaatatgttgtacatatagtgtaagaagcttagatctatatcaacattaacaccacggctgaaaacacttttattctttgattgactttcaacataaatgttgtatattgattcaagacctaatgcaatatatgaaggtcctattttatacaacattatcttgaaaatttcaacagcgtatgtattcatttgagatggaaccaaatcaatagttctagtaagtgcttccaacactaatttgtaaatgctttgagtaacttgtaatgataattcgcatttgttgtctgtgttaactgcagtaatattaggaacagagttcgaaaagattgttggttcattatttcctgaagatttgtatctttcaaaaatggaatgcttttcattaattttaacaaaagatgaatagcctgatattttcttaattcttcttgagctaggaacatattttttagcacttttcatcttatctctgaatatacgagaatctggtagataaagtgatgaacggtgagttgaagctatggatgattcgacagatgttgcagtagcgggtgctgatgaagattttgctgatgatgtctcatattgagatgttaaatcagtagttaatgacatgttatctgtttcattttgtaattctaccatttcctcttgttctttcaatgcttcaattgcaagagaaagttttttatcccttagagattctttatttgctatttcatatgattgaatcaaactatcaatcaattgatcaagattttctttttcaatcttgaagtaaaattcttctttcaaatattcattaaataatgaattgtaagctttttcaaactccaaagttaaatcaatattcttgtcaagtaaaaccgattttaaaggagatattgtcatttgtataacaccgttggagaatagttgtaaaattcttaaataacataatctactttgtggtagtgaagtttgagtaagtaatttcaatctaggtttaataatctttccaaataactttaatattaaagaagataaagcaaactttgaattttcctgaaaaatagtagtgattgaatcgatttctgaagacactgtatcacaagtcgcttctaagagttttgctgaaacagaatctaagctaaagtttgtaattgttggatcatttaattgtttccaaaaactcatatcaattttttctataacactatcttgcatttgactaaaattggatgactattgacaaagaaatcgacaatatttataccattattataagcaaataaagtttttgcaatattctgtaaacgagagaaatttttcgattgatagtaagtattgaaagaattaagttgttccttctcaaaggaatcagcaaattcaaatatcaaagttttggcaatttgtgcattttttaaactatcatcttcagctagtttggatgatagcttgagtaattgtgataaaattttagcagtttcgattgtgtttgcccttttcctatcagttgttaattctaatggtgcttctccttttttatagaaatgattatagtatttcattaaaaagattatattcagtgcattatcttttatggtatttgcctttcttaacttttcacctaatggatcaatctttgtggagcctaatttttctactgtgaataataaatcattgaatttcccttttaaatcagtagcagttggtgcttgatttaaaatattagtataatgatcattttcctttttggcagttgattttgaaaacaattcttttcttttatcacattcttccatcaatactaccaatctatcttgaacgctctgcaatgaattgatatacggagctggatcaacatattttatcttactattatcggtatgaatgtatgaatctttattagtctcttcagataattttgatatactattgataaaatcagagggtataacctcagatgaaaagctatctagcgttatcatactcgcatcaataaattcagatggcattttctagtcaattgcacttgcaatgtgtctatatcccacactttaacttttagtaaactgactttaagataggatagcacaatcccagtagaaccaaatagtaacatgtttatgtaatatagtggaaatcaaaaaaaatgattttggtgcactgctttcaatttggttgaaggctcagttattgaacttatctttagttatgtacagacctttaaatgtgcactataataatatttttatagttgcaaatgacttttattagcctgatctgtgttgaattacacttattttatgatttcaaaaaccttaaaaaaagtaatatatttttctttttctgtgtttttcaaatcatcttcatcatgtcttcaatgatcaatatttataataataaagatcaataatttaccacttttttaaactgattctatcactataattataatactacctctctatattataattaccatataaacatcaccaacaaaaagaaaatacacctacaagacagtaatataacagcatcacgacaatttccatgtcgcttactaaaaattacttatacgaactatacgaaaattatacgaaaaagaacgagccccaaggactctttgaaaagatcacacgttatcatggcattgaatcttaaagatactgactaaaggtcctttcttacaggaacaatcagtcttggatgtctgcattatctactgtaatttcagctttaataatagctgccttagtttttctctataatcatttggcaagagaacttaaggaaattgatcccttattattgaacaatcaaacttcaattagtgaaacaagaaagtcatgcgaatctgcaatttatagatctgttgatgttccacacggtgttagtgtcactagaggtttaaatttaagaagtggctataaaataagagatggatgtttgaaagatgtttggtattgtggattgaaaaatagagatgataaactaaaatctactgaaatagttttgggtggtaagtcttttaaaattgaagaaattaattacattttacatcaaatagcattaaaattgtcaaattttgaaaatattggtatatatggtgatttaatggaatcacctgaattactattggttgtttggtcttgctttttcatctctgataaaactgtcgtttatttccatagtaaggaggatcttaaatctaaaattgaaacaccagtctccgtacttattacatcttcaaagtctaaaagtgatatagacagcactgcatttaatggaactattgaaatagaatcattattatcaacatttgataaagaaactacaaaggaattcaaatacgatccaaacatggatttccatcatgtaaataatcattcattttcttatgtcgttgatggtaatgaaactaagtttttccagattaattttgtctcatcaattgcttcgaaattattatcaatcccaagcacaaaatcttggactaaagatgataatatgttaatttcatttacacaaaccacatttagtaacaacaatattatatttgaaactttgtgtggattagtttcaaacttgaatagaattgagcttgttaacccagataatatttcaaatcttcatgaattatcacaattcaaatcatcaattctttgtactgattctaaaattttgaaaaaattatgtacaaatagcaaaaaatcattctggcaaagttttaaattacaaagatctgaatatttcaactcattaggttatttcaatacatttggtaaaattgataaatccttaaaacttagaattatatacgttgcacaattgagtccaccattaagtccacaattatcatcgttaatgtccaatttttgtaagtctttgacgggaagtttgatagttagggaagtatacactaatttcacgattggaccaatcttgaaaactaacatatttgatttcagaactgttcaaaatcattcattgacattattaggagttcctgctaactctgtagaacttaaaaccgtcaatttcgccgagtgaacacaaatcaaggtgttatatacgttagaggtatgtccttgggtaagagtgatagtctccatgcagacgatgaattctgggtagagactgacattataggtaaatttgccagagatggatgtttctatggttctatttttaaaatgcactgagttcggattctctataaaaagactatatatagttagttcataaatgaatttataagtgaaaactcttcacttaaactgttagctactgcctattcactaactctccattacttcacatatatactattagtaagtaacatgtatactttattacgtaaccctttaccatacaatttatgaaatttctcatcctcctgtgtaaaattaaattttaggttaacgaagaatcccttgggtggctgatatattgttacttggtgggttgtttctataattgtatacatttgggatagacattgttaaccctttagagaaaacacgtttttagaatttgaactatccctataatcttttatttatcattgtgcttatatttagtttatgaaagattatactaatatgtcaaattcaggcgcaaattctgacattgctggatctactgatcaacgagaaataattgaaattcctgatctcttctgcaggacaaaactttggcaacttccagtatcccccacagtcacaagagactaggaacgatcaatctgaaacgcatgatagttttaaaaggcatcacaatcaatgaacgaaacaaacgaatatcaaacatctgaaaccaatatacaacaacaacaacatagcataaatcatcaaattgaaaatttaagtataacgggcaatcaaatgttagctctgcaacaacaggatattcttcaatatcaagaaccaactccaccacaaattgatcttgactttaatgacagtactaatcaaaataatagtagtaataatatgcatctaatgattgatgccatggctgcaagtagtactcaaattgaaggtatacgaatggatgattcatatatcaataatcaaaatattttagatagtcatgatgatgatcaaattgatgagtttgatcttgatttgattgctaagaagagtgcatcaaatgctcaatataattttcttaacaatacatttaatatggacagtattaatgatttttcattcaataattccaaatcttttatcaataacgaaaatgataattcttcatatggtcaattgaataagaatttcaaactagggtggctcatcaacattggcacaaactccattacaaactccaactcaacaatatacaagtaattttttagaagagaaacgaatatcattagcttcacaaactcatgcacctagttatactttgaatatagttgtacgacaatttactaaatttgcagaaagaaaattaaactttatgtttaaataattttccgttaaataaagaaccaaatatcgtcgaaatattatcagaaggggtagatccctaactttgatagagtgatttcctctttggggtatattgcaagaaaaacaccaaaaagagttactgatgctgttatgcactggcgtcgtgggaagtcagaattaagagaaatggctagatcaatgttagagaaaaacatgtcaaattatcaaaattatttaaattcaaagggaaatagatcaacttctcatcatcttcatcaaaaatcattatcaagatccaatttctcctatgataatcactctaactccaaagatgccactttaagaaatttggaagatcagttacataaatcagaagttacatttactcaagcagatcgtcaatttactattagtacttttatactatggagagttttaattgaagtcattaaacaaacaccaccatctactcttaccgaggatacaggacttgaagaaataatgtataattatttaagaagtattgatccatatttagtaagtcaatcattaatccattcagcaaattggaatttattatctgaattaattggtcaaatgtcagaaaaatcatttttaagtgttagtgatcgtttcatttgcgatcttgaaaaatttccaacaggttttacaaatgctaaacctttctctgaagctagtttaaatttattaatttatggtatgagatatttacaattttcaaatgcttcattagaaagatttgaagaaggtgcagattttattaaaagtttggctaaatttttttataaatgtgaaaatgaaaatttattcctttcatattgtgatgttatcaatcagttattattatctcttgccggtacattgactgcagaagttaatcatccaacatggcttgaagctgttaaagtgatttattcaaaggcaataaaaattgcaacttcaaattcaaataaatattggggtaatgcaattactttagcagttaccgtattatctgttgcacctaaagaaatgtttgaaaataaatggagatcaattgttgatagtatctccaaacgtttgaaaacctaaaacctcagcaagtgaaaaattaattgtaattacatgtgttactagattaacttgggcatatttattcagatatcaagatactttaaattctaaaacaagaacaatggaaaatcttgctaatttattgttccttaatatacagaaaaaacaacaatggttaactgaggatgcatttttgattcaaactgcagtccaattttttagatcacttgcatattctcaattaaattacactctcgaaaacatatttattccatttttaaaatcatcatttaaccatttcaattttgagattataagttatgaaaaaattattctctgtataagagcttactgttggattttatcagattatcaaaatgaagaaagaccaccatatccaactgatgatatcattcaaaattctttggatccattagaattttccaatacaagtgtagacgatgtttttgaacataactcatccaatgcacaagttcatgaagaaatttcatccatttttattaaagtattgttctctttagaatctcaatgtggatgtaagatattggatagtaatttaagtttaggtccaactactccatcttcagcaacaagtacatcaagtttacatcaaagaatatcaagtttatcatattttcatactactgaagacacatcatataaaagtagtgaattagtttactactgttattacaagtattacatggtgtgcaaatccttcaaatgtggcacattataggaaaattgttgaattattggttaaaaattgtattcatgaaaatgagacaactgctcaattttgtattgatgcattaaagattttgatttgtaagaaaaatccaggtgttatattgacaactttttcatcaattgcattttgtttagatgagaaaacttccaattctgttgataatgaatatttatcatctgataattatgttaaactgttagactattatttagaagttttacaatcatggctcgattcattgagtgaaactgaagaacaagaaactgaagaaaaagctaatactatgtacaatgttaatcgtaattttgttcaagaagaaattagagaaactaaaaaatttgagttacttgaattgaaaaatatggcaactttgattgatgaagttgaaggaaatgcattattgtttttatttagtcatgatttcagaattagatttcctaggttgtcaaattttaagaatgattacccaatttgatgatgtcatctattatttatcaagtgaagataacgatgttactaaaggtcataatagattaccatccaaatttgccgctgaatcaggtactagaattattgaagttttaggatcattaaattttgttgaattaacaaagaagaaaaaatcacaattcagtgaagctgaattaaaaagatatgcaaaatttatcaaaaatgaaaagaaaagttcaattgtcaaattagctgaaagtaatcatggtgttgatgcagctatatggtttaaaatatttgaagatgttttagatattttagttaaaacttgtcctattcaaatagctattgcaagatcacacagttgtatcagattagttcagttttatgatcaaattgttcgtatcaataatgaaaaatctacaggaaaagacaatgctattatttgggattacatgttatatttgaaaatagcttgtgcatcattaacatccactaatgaacaacgtgtccacatacctgatttgaaatcaaatactcaaactaatgctccatctatttatgcacctttagttagaaatcattcaagaaagaaatcccaacaactatttactgttcaacatcaaaaaattacaagtgccaaatcaattttcaaaatgacagttccattattaactacatctaatatcagacttagagatgcacttgttgaaggattaagttgtatgaatgttaatatttttaaaacttttattcaaagtattgaaagctctattgaaaggtgggaagattcaagtaaaggaactttttcaactgatatttcattaaagcaggaaatttgttgcattttaagtaatgttatttacaaaatatccaaaaccaataaagattatatggatgattatattttagaggtaattacaagattattatccaatttattgaacacattactaatgagaaacgttcaaattaactataagttccaaaggatgagaaaatatttttgtaatatacttgaaacagttcatacagttttgatggaaagtaattcagcagagaagtggctagattttaattttagaaacagaagttttcaatttatggttgaatggtcaggttatggggataaaacaccaatattcctcgatagatatagtttaatgagaaaggcaatatctgttgaaaatgatttattaaacttggaagcatcattagaaattcaaaaacatcaacttcaattaagtgcaattagttgtatttcatgtttatgtaaaagtcctgtctcttataaggatcaattatttgatttaggtactatctttagttggttagattctcttttcaaaacttataatgagaaaattagtggtttaggtagaagtgcattattaggtattttatgtgtcaatgggaatatcaaagaaatttttgaactgattgtcaaaaagtgttacacacatgattctgcattaggcaattactttattactttaacagatgcattggttcaaaatgttgaatttgaatatgaagtttacttaccactttcacttgcattattttcatcgggatctgataattataatgttagatcatcagctgcattattattggaatttactgagaataaattttataatacaaataatgttgctaactatgttgatggtgtttgttgtcgttcaagaatcatttataaaagaactattttccaattatctacatattttgcaacttcacatccagaggaaaaatttagaatgatttcagaattaacattattgttcaatctggttggctcaggaccaagacgtgatttgattgctgttttattaccatggattcaaactgttgatttggatttgacatctgaaaaagaccgtgcaaattatttagttgttttatcaaacttttttgacattactatgaaatatagtcataaaattcagaatgaattagaagctttatgggttgcattaggtaccgatagtacaggtgatggtgttaaaactatttttgattttattattagtaactcattatcgttgaaaaatctagcatttgttgaatgttcaagacaagttattgtttcaatttcaaccataccttcaatgaattttaatttaattgattcattattaactaatctagaaccaaaatcaatgataccaagtgaacctgaggttaatttaaatttaattagtgaaatcgagaaacaaaattttcctgaattgccatatgttgctaaattaagtaaattaattcaaaagaattcatcaactaccattccaacattttcattatgtgaattatcaataatttatttagctgatttaattttgataccaaatgataaagttagagaaaaattaccattattattaaatttatcaattgttttattggatcatcaactttttgttgttcaagatcaggcagctgcattaatcatacatttaattcatgaatatggtgatgcaacaagtgaggttggtcaaaggattattagatcattacgtaattctgatcattcaaataaattatgggattatgatgatttaacgaataataaaactaatggacgtaaacctgattcaatggatacattaattagagatttattaatcatttttgagagtaagataccaacaattcaaaatgattggagtaaaatgtcaatttactgggcaacaacatgtaaagtaatgcatgttgcatcaagatcatttcaagttttcagatgtttaatatcatttttagatcaatcaatgttaaaggatatgttattatgtttaactaatacaattagtgataatagtagtggaattcaagaattttcaatgcaaattttaatgacattaaatgcaattaccagtgaattatatagtgaacaattaattgcatttccacaattattttggtcatcagttgcatcattaacaactgtacatgaaaatgaatttattgaagttttatcaacattaagtaaattcattagtaaaattgattttaattcagttgatactgttaattgtttagcagctacatttccaagtaaatgggaaggtaaatttgaagggttacaaaaaatgattatgattggacttagatcatcaaatgcatatgaaccaacattgaaaattatgagtaaattaaatttattagataatagtcaaattattggtgatggtaaacatagagttttattaacattattagccaatatgccaagatttttacatgcacatgtaactaaaaggtttaatgaggacataattaatgcaggtaattgtttaattgaaatgtcaaataagaatgaaattattggattatcaagaattattgaatcattaattaagaaaaaatttagaaataaggaagatttccttaatcaaattgttaatttattgaagaggtatttttttcctaaatttgagtttgagacaattacatttttattaggattattattcaataatattggatggattaagattgagacaatggatttattgaaacatatttttagagtaattgatttgaataatgaagaatttaatgaattaggagctgatttaatttcaccattattaagattattattaacagagtattcagagcaagcattagaagttttagatgaagttaaaatacttaaatcatcaccatttgataaacattatttaatgatgtcagttggtgataattcattacgtaaagaatatgataaaatttcaacattatttggtataccagatgagagtggatggtcaatcccaatgccaagtattagaactgcaattacaagaaataatgttcattcggtttaccttacatgtataatggaattgaataagattgataatgttgaaaaaattgagaatgataatgataatgataataaaaatgaaaatgaaaatgaaaataaggttgataatgaggaaaatggagataatgaaattgttaaaggattaaataataataataataatgaagaagaaatcaatgctaatagtacaaccaaggaaattttatttgaatcacctgaatttgtatcacaatatgttcaatataatcccttatcaccagaacttcaaaaacaagttaatttacatcatcaaaagcaagagagattaattaatgataatatatcaatcaatgaaaaagattcattaagtgatatgttagcaactttagagacattagattcatttttcactaaagatattgaaagtgatggaatcagtaagggtaaaattattaataaaaatgaacaacgtacaccacagagacatcaatatagtagttcaattgacaccaaatcaactactaatactgataaaagtggatggaattatgattttgataatacaatgaatatgaaccttaatatgaatattattaatggcaataatttatttgatagtaatgaatcatttaggacattattagcagatgttaaatcacctaatagtaatgaaattttattatcaccaagaattaagagggataaattttacaatcatggtagagttaatagttttggaggagaattaagtaaattaaggaataaaaatagtgaaaatagtatgaatattagtttgagtagtggtagtgttaataataataatggtatgaatgttaataataaaagttttgaagaaaagggtaaatatggtaaacatattaagcatattgaaccattaaagatttcaagggatattagtattaatagtaggaaagataataataataaagaagaagatgatttaattgataagattaatattagtattaagaagaaagatataagtaataagaatacaccaattattatgaataatggggataatttgaagaatgatgataatgaagatattgataaagttttcggatttgaattaattaaacaaactaacaataaatcacgtagatcaagtagatttagtacaaatttccataatgaaggtaatttacttttacaaaatagtccaatttcaccaagatatccacgtagtccaagaaatagtaataatagttataattataattattataatcacaatagttataatggtggtggtaatggtggtggtaataatacttataagggtaaatttaggtttagaaaaaatcatagtgaaaaagaaataagtgagggtgaatgaataattttagttttgtatagaatagtgatgagtttttaatgtaacagtagtaataatatatacagtatatatataataattataattataattataatgaatgaaacaattaagagtataattgaagaagaggataataatgagagtataattgtattaataaatgaacataattatagtaattgggtagagataagggataaaattatacgtatttttaatagaattttacaagaattttataaatatgaaggggatgatgggtataaagtaattgaaatattagatagatttgaggaatcaccaccatttacaataagacaatttttacaaagaatgattgaagttaagaaagaggataagaataggaatgaatataatatagagaagggtaaatttcggtgtaagatacgtaatttagttgaaggtaatgaagaggagatgatacttgaaaataggttttataataatggaattaatgataatgatgataatgatgaaattaatgaatgtgaaaggtatattaatagattaattaagattattaatattgagagtagtattaaagatactgtgatttgatattaatattaatattaatataataatatgatgtatgtcttatgattaagtatagtatttattatgtatgtaatataatataataattataaattcagattaaattaaattaaattatttagcatttgaattcatttttctcttaccaccaacggtaacagcagaattaacaaatctgttggtgtacaataatctcttgtaagctctaccctttggtttctttggcttttcttgtttatcaacttttggagtttgagacttaactttacctgctctggcaagggaaccgtgaactttaccctgtaggaataataataagaagaattatgtatgttagtattatgatctattgatgattgggtgtaatatagatagttatacgtaccatttttgtattgataaatgaaagaaggtataatatagagtgtattaaaaattccagtagatagtaatataatgatgatagtaatatctctatagagagtgagaaattttaaaagagagagagagggggtattgcgcgagggttttcctaaaagagtaagcagggtttagtgtatatggtagtggtagtggcataccctctgcggtgtcacgtgttgatgtgtattatgtacattattattattataattaatagaattaatatcaatatgataagataactaccactctcaaatacatcattagttatggaatttaataaatattgaattctaatatatcttattgtacctattatcaatgtaataattgataatgtgaaaattattataattaatggtttatatgataaattattactataattaatgttaatttgtacaataacaattgctaaaagtataagacttaatgaagttctaatataagctaaaattgtcctttcattagctaaatgatcccttgcttcattacctgaacttactatcatatcattacttaaatataaagaaagagttatatactatactataataccgcgataacggttatcatcaattgcattaatacatttaattgcaattgattgagtacttacaggtggtggtacccaatttatgaacattgatgcactaccaataactgatttcaacaatttccttgtattactttcatcatttgcatcatacataaatccaggtctaataataattggtctaataccacctttttcattacttaatttaatcatatattcctctgcctctctcttacttgtaatataaccctttggtataccaggtggacaactatgtgctgatatataaactaatggtatatctttatttaatgtattcccaacaatggatacttcattagataatttaattaaactatccctattaatatcattataagtaattgatttattcattggattaaataatgatggtataccattagtaataaatgttgataaatcaccacttaaagattttttataagttttattctctaataaaataccaacggtatcaataactgcatcataatcttttagaatatctctataagaatcaggatttaataaatcaccccttagagaaccattactatttctagatatagcacccatatgccaaccctttaattctctacctgcattacatatagctttacctaataatccattaccaccaaacactaataccttcattgcagtaaagaacttatcttaataagagataagtgaaagttacccgctcaacaaatcaaaaagagaaaaaaagagacgcacagcaccgctcactgaaaaaaaagctagtgaagacattctctcactgtgaggaaaataatttttcacttttactctatattggattgaagagttagataatttaacattttattgctattttctattagatttatcttattaaagtatacaaataatggactctaaaacccctgttacattagctaaagttattaaagttctcggtagaaccggttcaagaggtggtgtcactcaagttagagttgaattcttagatgatacttcaagaactattgtcagaaatgttaaaggtccagttagagaaaatgatatcctctgtttaatggaatcagaaagagaagcaagacgtttaagataagtcttatgtgtgtttgttcattcatttctatcactatcatcattttataatataatataatatactatactatactatactaatataattattttataattaattaaaaaatatttcaatttttactaatatactatactatactatactatactatactatttaagaaaactactcatcatatcttgtaataaattactttgtttcttaataaaactaatatcataataacttattgcaatttcattaattttctcaaatataccttccctatttaacatattattatatcttttcaataatgttgtaaaactattactatcctctttattaaatctttctaagattttaactaataattgaataaaattaatcacttctccattattatcatcatcaccaccattaataattttcaacccttcaatttcttcatatttaatcttatctccattcctctcaacatacttattaatcatttcattcattgcaattttagcaaatttaatattcttaatcattaaatatggtataacaattctctctaaatatttattaaattcaccattttgtaaataacacccccattcaaattcaattaataatttaatactattttcattattatttaaaattaataatttctctccattattaatcatattcttatcaccacttttaatcattttactaccaaataaataattaaccttttcatcaccaataattttaccactcttatttattaaaaatttattagtttcacgacttaaattaattaaattaatatcattatttggtaacatattaattaaattaattaatttaattaaatcatttctttcaaattcattccattctttattctctttttcaaatacttcaattaaatataaatataaatcggcactttcatcaaattgtttattattaattaaaataatactactttgatataataatgaaattgctaaatcaaattgtttcttaaaaatatatctattagtaattgatctaatagtttgttgtgcttcataatatgatccattagcaatcctttccttaaatctctctaatgatttagttagtttgttgtccattgtattttgtcttgtactcttcaaaaagaaagaaccttactaaacgcctgtgcatacacatgtagtgaaaaaaattatttacgcagtagtagtaaactctttatgaaacttctcttctttaactatctatagtctattcgtatagagtacaatgtggaataaggaaatgaagagtctgtcttcatcaccattacattcatcatcatcatctaattctattaaaccacctgaaaatccaattcataatagtaattataataataataataataataataataataataatgatttaataccaaaacgtaaatataaaaaagtaaagaatattttaaatacattagacaaaagtaaaaataaacccaattcatctccatcaaagaagaaacagaaaagagatgtttatattcatgaagaaacatcattaattaataataataattataaatcatcatcaatttttaatttaaatgataatagtgataataatgatgataatgatggtataatgaaagaatttaatgttgatgatataattgatcaatctgcaaagattaagaaagaaattgattcattgaaaaaacgaaaagatagagatattagtgaaataccgaatactagtagtaataataataataataatataatagaattaagtactgatgataatgaaagtaataatgaaattgagttatttcataagaaaaagaataaagaaatcaaatcattagatggattgattaataatgaagaaaaaatcaaagaaataactgataaattccataaatccaaaccttatatagagaagaatattaaattaattaaatcaatgaaagatttagaaaaatttgttaaaaaatatgaagataatataatagatatacttaatggtaaaagaggatcatatttttatatggaagcaaagaagatagccaaaaattcaccattattaacaattagagataatgaattaaataatttacctaaaaataaatattatggattcattggagctattagaggtttccagattggtaaaataattgaaaataataaaaaggtaggtggtattattaataaattatctaaaagtagtgaaattattaaattttggacaattaataaatttatacagtttattattgtacctgaagtaattgcaatgattatcaaagatatctgtaaattgaaggatatggatgatatatatgatgaaatggaggataccaatgaatacggtgtctatattaccaatcgtataccaatagaggagagtataatacccatcaatacagacttttcatcagacttatcatcagaattaacatcagaatcagaatctgataatgaaggtgtgttatcgtttcttaattaagtaattatcgcgtattttatatagagaagacttgtttaaagtggaaaatttttcattaatgatattaaccttgatatataactctttttaagcttcttttgagggacaataaaggtatataataaagatgtcaggttatccaagaacttgttttaaatgtggtttatcaggtcataaggctgaagattgtgatcaaagtgaaagattatgttataattgtaaacaaccaaatcatgaatcaaaggattgtccattaccaaagcaaacaattcaaaaacaatgttataattgtaaagaaattggtcatgttcaatctgaatgtccaaaacctgttactactcatcatagtggttcaagtcaaaaatgttttacttgtggtaaatttggtcatattgcaaaagattgtagatcaaataaatcattatcttgtcatagatgtggtggtgcaaatcattatgcaagagattgtcaagctgctggtccaaaatgttataattgtggtttaactggtcatgtctcaaaggaatgtacttcaaatcctgctccaaaaacttgttataattgtaatgaagaaggtcatctttcaagagattgtccaaattaaattaatgtaatgtaattaaatagatacatattataaatttatatattatataagttttttataaattgcatctcccataagacaaacatctttcatttctttaaaatcatgaactctaacaatatcactaccaaatccaatacatgcagtaattgatgcactcgtaccattaattctctcatttgctgtctcccttttagtaattgtaccaataaatttcttacgtgaaggtcctaataaaattggtaaatatttaaaactaataaattcattacttttaatattcaattgttgataatttttcataattggtaatttcctaattatacttaaattttcctttaattttttagcaaatcctaatcctggatcaagtataatttgccatcttttaatacctttagaatacatcttactcagtaatttacttaattccttagaaatttcattgattactatattatcttcatcaacttcaatttcattattcaatataatcacttcatcatcttctgtcttactataatcatttaattcattcattgtcttaatattaccccttgtatgattaataacatatggtacattatatttagcaattatttcatacattttatcatcaaatgtaccaccacttatatcattaattatatctgcacctaatttaattgcagcttcagcaacttcacttctatatgtatcaatacttataattacttcattaccatatttatccttaatttctttaataattggtaatattcttgataattcaatctctacacttggttgttcactacctggtcttgttgaacatcctccaatatcaattatatcaacattattttgaaccatttcatcaactttttccataactttaatgatatttaaattttctttagaaccatcactaaaggagtctggggttatattaagtattgacattaattgtgttggtgtttgattatttattaaatcatattctaaatatctaaatttttcatcatctttaatatttggtagtggtattaatgaaattaatttattagattcttgaattgatatgttactttcactttttaataattgaattagatgatcaccaattggttcagttgtaactggatgaatgaaagttgatggtaatatttcacttaatggtataagtacaaaagttctttcaatcatattaatatgaggtatatttaaattttcatcattaattatcatttcatcatacaataaaatatctaaatcaatacttcttggtccattattaaattctttaacccttttcaataaattatattcaataaattttaaatatttaagtagttcctgcggacttaaacttgtgcttattttcaaacatccattaataaaatcaggttgattaagataatacattggttttgatctatataatgaagatgtttgtaatactttaatttcattattatttttcaattgatttattgcttcatttatattacttaattgattaccttgatttgatccaaatgataaataaacttcatgaaatttaccatctttaaaattaccatcaatggttcccattttaggtaatgaaaattcatcaatagttacatcattttcattaaatttgattatttcagtaccaatatttgcaatatctttatttgttttaaatgttgaaacaccaacatcagcatattctataatatcagttttcagtactttaacatcacaattaatagtatttggtaataatttgaaaactaatttattcacattaagtactaaagcttcaacagttttaaaatttgaattttgtaaatacttggtaatttcattaccaatagtttctaaattataagtatcaagtttcctattgaatttagtttcaatatcaatatctaatttaatcggttgtcttttgaatctttcaaatgtgaaaataccaataattgcatctaatgataaattcttaaaatgtaactcatcattaatatcagcatggttatcattctttaatactagttccgtttggaaattagggtaagtattttctattttaatagttgcagcatcacaatgttcctttaataatacatcatttattaatgaatatcctaactgaataaatgaaggataatttattgatttattattattttcataatctttaaaatttcttgaaacgacagcataattaattgaatattttaaatcatcatttgaacttgcattatcaaaattagtatgaaaaatacttgtaattaataagttattaattatttgattattaatcttagcattatattttaaattttcaattataacacaatctttatttgacattgatgataaggtacgtaaagatgaaaatgaaaatgaaggtgaagataaagaaaaagatgaaaatgaagatgaagtgtaatttcttaccaaatacggtattctatttgatgaaaacagttttaataagtagagatgtggttactaatctccaatagtttaagaaagtagatcaaagataaagtagatcgattaatgaattaactttcagaaagtgaaaaattatttttattgaaaatctttaacaccgcgatatagtaacctcatgtcatgttatattattatgttttataactgctttcttttcattgggacaagaatgtttagaaggtatttgagtagtactgccaggaattggaatagtgtagtgacaacaacctaatgatattgttattataggaggaggacctgcaggattaagtttagcatctgcaattaagacatcaccaattttaaaagatttaaaatgtactttaattgaaggtaataaattaattgatagtttagaaagttattataataatccaccagaatatattgataaaagagttgttagtataacaccaacatcaatggattttttgaagaaaattggtggttgggattatgttaaacatgatagaattgaaacttatgataatattcatacttatgatagtatatcaggtgctaaaatggaatttgattcacctgaacttgcaacaatgattgaaaatattaatattcaatcgatgctttatcaaaatatcaaaagggttaataatgagagtacagaaaatgaattaatattacttgataatacaaaagttgttaaaattgaagaagatccacatagtgaatggccaattttagaattaagtaatggggataaaattaagacaagattattaattggatgtgatggatataattcaccagtacgtaaatttgcacaaattgaatcaagaggttggtcatataatagatggggtaatgttgcaacatgtaaatatagggataatgaaattagattatcaacaggttggcaaagatttttaacaacaggtacattagcattattaccattaccaaataattggtgtagtttagtttggtctgtaccacctgaaatttccaatatattaaataaattaaatgatgaacaatttaaatttatgattaatgcagctgcaaaattatcagaaggtgaattaaaatatctttatcaaatagcagataatgattcagataaattaattgatgaaattaaatggagattagagattttcaataataaaccaacaaataatagtgaagattatccattagaaattgaatttattgtaccaaattcaagagctaaatttccattaaaattaagtaatgcagattcatatattgaagatagaattgcattagttggagatgcagcacatacaactaatccattagctggacaaggattaaatatgggacaagcagatgttaaaagtttagttgagacattagaaaaatcatatatgagaggattagatattggtagtaaaattgcattagaaccatactggtcagatagatatttaccaaatcatgtaatgcttggaattgttgataaaatacataaaatttattcaactgattttacaccaattgtttgggctagaagttttggtgttaatgtattaaataatgtaccatttattaaagattttatggtacaacagataagtcataaagattaagtattgtaagtataagttattataatcagtattaagcataaccctataaacagtagttgagcccctattcatacactaatatgaaaaatttccagagaggatcaaataacctcgattgggctattggaagcgaataagtaaagtttatgcttaatagagtattttttttgttttatcttattaattatcttatttctttatataaaacccagatttctttccaggtttctttatttctccctttcttttacttgtatattctcttttaacatctataactatgtctactgaaggtaaagtatgtatataattattataactattattaattgaataaatactaacactttcacattttttttttacagacaattacatgtcaagcagcagttgcttgggctccaaatactgatttatcaattgaaacaattgaagttgaagctccaaaagctcatgaagttagagttaaagttgactacactggtgtttgtcatactgacgcttatactttatcaggtcaagattctgaaggtgttttcccagttgttttcggtcatgaaggtgcaggtattgttgaatcaattggtgaaggtgttacaaatgttaaagttggtgatcatgttgtccttttatatacacctgaatgtggtgaatgtaaattttgtaaatctggtaaaactaatttatgtggtaaaattagatcaactcaaggtaaaggtttaatgcctgatggttcatcaagatttacttgtaaaggtgaaaaattatttcattatatgggttgttcatcatttgctcaatatactgttgttgcagatatttcagttgttgcagttgatgaaaaggctccaatggatagaacatgtcttttaggttgtggtattacaactggttatggtgcagctgttaatactgctaaagttcaagaaggtgatacagttgcagttttcggtattggatgtattggtttatcagttattcaaggtgcagttgaaagtaaagcttctaaaattattgcaattgatattaatgataaaaagaaagaatgggcatcaaaattcggtgcaactgattttattaatccaacaactgatttaaaggaaggtgaaacaattgtttctaaattagttgaaatgacagatggtggattagattatacatttgattgtactggtaatgttcatgttatgagaaatgcattagaggcatgtcataaaggttggggtgaatcaattattattggtgttgcagctgctggtaaagaaatttcaactagaccattccaattagttacaggtagagtttggaaaggttgtgcatttggtggtgttaaaggtagaagtcaaatgccaggtttagttgataaatatgttgatggtaaattaaaggttgatgaatttataactcatagacatccattaagtaaaattaatcaagcattccatgatatgcatgatggtgattgtattagagctgttatcaaaatgcatgattaactagcacgcttatgatgatgtttacatttacttaatttactaagttaactccatttatttataattattaatatacttgatgtatcatcatcatctttgaaagatataaagtaataaactaatagtaatagtaatagtaatagtaatagtaatagaagtaatagtaataagactataagtcgataataataataataataataataatatctcactcactttctgaaattgaaaaatttttttattatatgagagaggaatatctccaatttttcacttgttgatgaaggagtaggtttatttcatagaatacttcctttttaaagcatcccaaaccatgtcttatcaagcagggtcgtcctgaaaatgtccttagacgtgctgaagatctgattgctattgatcaaccagatgttgctttacaaaaactgtataattttattatctcaaagagagcaaaacatattgatccaacaactcctcaattattggatatttttaaattatttattaaacttgcaattaataaaagattcactaaagatattaaggatgctctctatcaatataagaaaatgattcaaggtttaacttcttcaattggttatgaaaatttagaaaatttaactaaattccttttacaaactgcaaatttaaaattaaatgatgctcaatcagaagcaaatgatgctgctgaaattgcaattgaaaaatcaatagcttcagctgctgctgcttctaaattagtttataatcgtgttgatgatgaagaagatgatgatgatgaagataaagatattaatgataatgtcgatattgatgaatctgatgatgaagatgcaattaattttgaaatttcaccagaaaatatcttattatcttcagttacaactgatgatagtgttgaaagatcaaataaagaatttttccttccttggttaaaatttgtttgggaatgttatagaactgttttagaattattaagaaataattctaaattagaaacttcctattgtcaagtttcattacaagcatttcaattttgtattaaatatgatagaaaatcagaatttaagagactttgtgaattattgaaaactcatcttttatcgaattaataaaggtgattattatgaagattcaattaatttatcaaaacctgatactttacaaaaatttttagatgttagatttcaacaagttaaatactgccgttaaattagaattatggaaagaatcttttaaaagtattgaagatgttcatggtttaatgaaatattctaaaagatctccaaaaccagttgctttaattaattacttataataatttagctaaaattttccaagtttcaaatgattatgcttatgcttcagctgcaagacaaaaaattttccaattattaattaaatctccaattatcactgatgatgaattaaaaggataatgcaactatttatttattaactttattatcaattccaattttagattctttcaaaaattcattctcaactcaaactggtttaacagatgctgaattttataagagaaagaataataaattatctaatttattaaacttaaatcaaactccaactcgtgattctttattaaattcaaatgttctgaatattgttttaaaatatgcatgatgaagatattgttaaattatataatttaattgaaaaatcttttaatccattaactttccattcaaatgttgaaaatattttagttaaaatttcaaacaatgataaatttacttcattcattcaaccattaaaggaagttttcattactaaaattatttcaaaaatttcaaccttatacgattcaattaaatttgatttcttccataaactttcttcatataatacagaaattttcaattataatgaatttgaatttgaagatttattagtctctggtgaatattctaatttaattaaatgtgaagttgaaattgatgatgaagcaggtgttgttaattttaatgataaaatttattcatcatcaactacatcatcaattaattcacgtttatatgatttacaaaaagctcttacaactgctgttaatattattaattttgatcaaattaaattagctaaggaacaattaaatgaaaaattaattaagaatgcaaatgaaacatttgaagttgaaaaacaaaatattttacatactgctgaattaattaaacaacgtgaaattgaattagcaacattaaagaaagaagaagctgctcaattagagaaacaaaaggctgaagaattattaaaacaaaaacgtaatgaagaagaacgtattaaacaagaagctgaaaaacatgaaaaaggaaagaattgaaaaaacaagaaaagaaatcgatttaggcaaataagaagaatattgttaaagatattaattcacgtggtgtaattgaaattaaatttgatgatgttaagaatatgacagaagatgagattcgtcaatatagttatcaaaaacttgaggaacaaactcaaaaacttgaagaacaaagtaatgcaattttcaagagaatggattatattgaaagagcggaaagagtttatgaaattccaattttaaagaaagaaattgatgaagatgttaataaacaattagaacaatataatttattaaaggaaaaacatattgaacaatctaaaatttctcatgaaaaattattacaagttaaggaaagattatcacgttttgttcctgcatttactgaatataatgaacaagttaaagaaattaggcagaagaagaaattgaagcaaagaagagaaaggctaaagaattatttgaagctgaaaaacaagctagaattgaagaatttattgcaaagaagaaacaagaatattatgataatattaagaaacaagaagctgaagcaaaggcaaagaaggaagcagaagaaagagaaattgcagctgcaaaggctagagaggaagctgaaagaattagagcagaggcagctaaggctagagaggaagcagctaaggcaagagcagaggcagcaaaggcatcagatccaagaaaattagaatatgaaaaattaaagaataaggaaaaacttacattctctgaaaagattagattaaaggttttagcaaaggaacttggtctttaattgtttataatatagttataattaagtttatagtttataagtaacatcgataattaatattatcaagtcaacaaatcgatgaaactatactattttttctagaccacaacaaaagaaacgcgattttttttcaacaattttcacgataacatgattcaatgatacagttttaaagacaggtgtttgtttgctttcatgtgtgggttcattttcttttgaagttatcttagcttaaataagccattgctagactaaataagaacaactatgacattttttcgatgaaatgaagacaacttttaaggatattccacgtcctgaaggtgaaatttccacacttgaatttttagaagcatcatgaatcattagttaaattatttgatttatttggatcatcagcatttagtgttgttcaaaatgatatgaaaggtaatattaataaagtttcaacaaaatttttatcagatccaattaattgtaatacattgcaaaaattaattttattagaaattaaggaaaatggtaaaaaagttgcaactcaaggattactttggttatgtagaggattacaatttactgcaaatgcaatgagaaaatgtattgataataaagattgggaattaagtaaatgttttgaaaaatcttatagtgaaacattaacaaaatatcattcaatgttaattagaccagtattcaaattagctatgaaagcatgtccatatagaaaagatttgtttgttaaattaggcgatgatttaaataaagtcaatgaacaattagaggattgggttgcaggtttagaagaaattgttgatgtaattatgaaattttttcgaaagtggtaattacggcaaaggtttataaacgtacagttagcataatatatttcttttctttttataattaataaaattaattgatttttgttagtaaaattttgtcagttatagttatagttagttataaatgttatttaaaaaggaaaaatgaatgaaaaattacagaatgaaaagaaagaattgtgatttgggtaataaaaaaaatattaacattattatgatatgataaaatatgcgattgaagtaaacaaattatcttaatcttaatttaacaaaattataataaagataataagattgctgccatagtaccaaagattgaagtattctttaatgaagctgcaccacctctacttagttgaagagattgatgaaacggtattagtagcagaagatgaatttgaatcatcatcagatgatgaagttgaagttgaatctctagtcattagttgaagattcagaatcagttgaagatgattttgaagttgaagatgaaggctttgattttgccttacatttaaattcaccttgaataccaccattctttgataattttttgaatggatcacaatcagcataacctgaagtttctaaatcgaaagcacctctaacagttcttaaagaagacatagtacaattatcaaaatcaccctttaagacaacagcaccttgaactgtcttaattttatcaacattatcaattgaagttaaatcagtattattaacaataactaaaccaccaccaattgcggtaacattagagaaatcaatgtaagataaatagttgttattttcaatagttaaatcagaaccaattaaatcaactaatgggaagtttaattcttgaacagatgattcaaagaaaccagcagatttattaattgcaactaaatttggcattgagattgaagcaactgaatagaaagttaaattattagcccaaactaaatcttcaaattcaacaacggtatcatcaccattgaaaccaatagataaagcatttgaaacagtttgaatatttgaagagattgaagctaaattaaagttattattaatattgaaaatttcaacattacttggattaataccatttaaatcagataacatagtatctgagatataaataggaattacaatcagtaacttgagttaaaccagtttcaactaaatttggtaaagtaacccaattaatagcaccgacattatttaatgaaccgaatgaaagagttgaaaggacagttaaaccatgtaattttaaggaaccagtaattgttgtaattgcatcagcagcgaaaaattctaaatttgttgcattgaaaatttgtaaatcaccataaattgccttaacattagcgattgaagcagaacctaaatcacctgtaatgacaatatcaccttgaactgcttcacaacctgcgaatttctatctaaatctgattgagcagttgcagtgaaagtatctctaaaggaacaatcctgaagcaactttaattgaagtagttgtttgtaatgaagcttgtaaagaagttgtatcttgttcatccgttgcagctaatgaagtagctactaaagcgagtgaggataataaggtactaaatctcattataaattgtatactaaatgaagggagtttaaaagagaacaagaagaagaaggttatacgaaatgaaaacaaaaataaagaaaagagatgaaaagagatgagttgaatggttattagtaaatcaaagaagtaattaagtgaaaatatggaaatgaaataggataaaataggataaaataggaattcaagggtgaaacacgatatttctaaatataaacagtaaacaatagaaaatgcaaattttttaaacaacgccacgtaaataataataaataataataaacaaaagtagtttaagtgatttaattggttaaaatggtgaaaaggaggcgcgcgcttattaattgtgctgggttttagcccttttattattgtttttgtttttcttaaatgttttgtttgtttactatgctgatttattgggatcagaacagtaattttatttatttttcttgattatgtcagctttttttagggtagtcgcgtctgtttggtttttttattttttcatttttttatatttttaattggaggctcataattatagtatcatgatgtaatatttaaatatattgcaatgtaagtaaataaataaattgcccttccctgttgatatacacatacacaatcctttctttctttttgacatcaattgactcaattaaataagcattctaacccacaattaacatctaaactcaattatcaatgttagaatcgcttgtggcaagcattttaaataaaacccttggggcttatgtagaaaattttgatccaaatcaattaaatattggtatttggtcaggagatgttacattgaaaaatttaaaattaaaatctgaatctttagataaattaaatttaccaattaatctaaattgtggtcatttaggtactttaacaatgcaaattccttggtcaaatttaaaatcaaaacctgttaaaattttaattgaaaattgttttatcttagcctctgctaaattaccttcaaattttaatttaaaagaagaattagagaaaaaattaaatgctaaaagacaaaaattaaaagatttagaaataatttcagaaaataatgatataattgatgatttaaacccaaataataataataataataataataataataataaatctcaatctacattcactgaatctcttatctctaaaattattgataatttacaaattacaattaaaaatattcatgttagatatgaagatttcgattgttatactaaattaccttattctttcggtataactcttgatgaattatctgctgtaagtactgatgaaaattgggttactaattttattgaaaatataagtaatatgtcaagaaaattaatgttattaaaatctttaacaatttatttagatacttcaattaataaatcaacttccctagtgtcaaatgataaagataaaatgttacaaaatttaaaagattatattcaattagcttcaaataataattctcaaaatgttgaatatattttacaacccgtctctggtaaaggtcatttaactttaaataaattaggtccaactgaaaattctcctcattatgatttaaaattatttttcgatcaatttagaattaatcttaatcgtttacaatatacaaatatacttgatacaacaactgaaatgaattatttcatgaaaacttcaaaattcaaaattaatgctccaaaatgttcaattaatgaagatcctttaaaatggttacaatattctttccaaactgtttataatgaaattcatgataaaaattataaaaaaacttgggattatttaaaaattagaagagatcaaagaaaagcttacattaaattatggaaaaaatatttattagacaaaaaatctttaactatagaagaaaatacagaattgaaaaaattagaagatgattgtgaatttgatgatttaagattttacagatctttggctaaaattcaatttaaaaaggaacataagattataccaagttcttctggttcaaattctacaactaataccaataataatcaaaataaaggttggttttcatcttggtggggatcatcaaatgaaaatactgaatctaatagtaactctgaaaatacaaacaatattcaaataacgaatgaacaaattaatgaattttatgatgcaattgaatttgatgaatctaaagttttatctgattcaatcgatataccaagagaaagagttaaattttcaattaattgtaaattacataaaggttcttttataattagatctgataaaaattctaaaaatctggctgaattcatatcccaaggttgtcaaatggatttccttcaaagaaaagattcttattttgttagctttaatttactcaaattattagttgaagatggttcaagcaatactctttataaacatattgttaatgtcaaagaaattatcactgatactaaaccaaataataatgattacattgatcattcaatggaaattgatgatgataatgatagtaatgaaactcaatgtattaatatagatcttgaaaatgataaaattgaaaaacctttctttcatctatcgtatgaacaaaatcctttgtctaaaattgctgactctgaactaattgttaaattgagtagtatgactattttccataataccaattttattgaatcaatttatgaattttttaaacctccaactgctcataaagatacaattggctcaattatgaatgctgctgaatcaactattcaagattttaccaaacaaaccaaaattggtttacaatatgcctttgaggaacataaaacaatgaactgtcaaatggatttgcaagctcctttaataattttaccattagatccaactaaatgggattctccaattggtatattagatgcaggtcatattagtattgcaagtgaattaattagtccttctaaatatgaagaaattaaaaatgaaaataaagaaaattatacatcaaatgattggaatagattaaattcattcatgtatgataagtataatattttattagaggatgcacaaattttaattggaccaaatattaaatcaactattgatcaattgcatacttctggacctaaaccttcattaatattagatcagttaaatgttaattttttgattgaattatcaattatcccatcattctatgatttaccgaaaatgagagttaaggccgatgttccaagatttattgcaatgttaaatgattatcaatataaaatattcttagatttattagatagttcaattccaaattttgataaagataccaatagcgctaatataacaacagcaaacaaaaatggaaccgctaatgtaaatgattcgcctgatgatgacaaagatgtattttctgatgcttatgcatttttaccaagtaataatgataatgaaaatgaaattaattatgaaccccctggatcagaaacaacatccatagttgatgattcaaatatgactacctcaattgatactttatcaccagcattgaatcaaaaatcgattgttttcgattttacaatggatttaatggttgtatcattaaaaagatgttcaaataccacaacttttgaatctgaaaaattagtggatttagttggtgaaaaattacaattatcacttttcagtactgagagagaactgcacgttgatttattattagctgatttatctgttaaagatcatattgaaagctccaacgttaaagaatttaagaaattagttggttcaagatccagatctaaaaataggtcaaaatcaaaatctaatgatgatgttaaatcggataatttatttgttgttaattataccagaacaagaagacttgcattatttaaagatgaaactattgaatgtttcgatcaggatattaaattggatatatctgattttcaagttgtcatcaccaggaaaaccttattaacattacttaattattcattaaatacatttactgatcctttagctccggagttaccttctgataaattacgtcataacgaagaagaaaccgttaattcacctgttcatatcaatgttgatattaatatgcaaagtattcatatgattttaaatgatgatggtattaaattagccacattagttttagataaagcagatgttggacttttcattttacctgatagcatgaaagttaatgcaaaaattggtggtttaactttaattgataacgataattacaatggacgtaaattaattagtattcaaggtgatgatttagctgatttatattatgaaacttttgacccagagacgaatacattgccatatagttctcaatttaaatttgaaactagatcaatggttgttatgtttgttgaagattcattttccagaatttatcaatttatttgccaattccaaagaatgaaatatatttatgatactgctagagaagctgcattaaatcaagcaagtaatgttgaatattcaaatacattgaaatttgatgttttgattcgtgcacctatttttgtttttccaaaatctgttgatccggttaataatttgtttgatactataacagttaatcttggtgaaattcatacatctaacgattttattaaaaccgaaacaaatgatgaatattttaatttaatttcagctggtttgagtaatacaaaaattttatcaagttttgttgttaatggatctgagaagcaaaatttagaaattattgataagttagatattaattttgatatcaattattatgaaggctgataaaattaaacgtccttcaataattgttaatggcgatttactcggtaatgacattaaattaacagaatttcaaacttttagttttattcaaatttttcaaagtttccccagaattttcaataatgttgatatagatgatacagatgttgaagaaattgaattagaagcggataatgcaaataaaatgattgcagttactaaatcttcagaaagtaataaaacagatgaagctccaaccacacaacaaagtgatgaatcaactattggttataatgctaatgatgaaacatatgtgaactctaatagtgaaactacagatgaagtaatggaagaagaagtacctaaaaaagtcacagttgatttatcatttaatgttccgacattaggtttaagtttattcaatgacacttgtcatattgttgatatttcagataaaaaattatcacaatttacattgactgagttaggtattaagtttcaattgtttgataatggcgattttaaatcagattcccatattaaatcatttgttgttaaagatgtaagatcaggtagtactaatgttttcaaagatattattccagaagctattcactctaactatcaatttatgagtaatatccaatcaatcaatggtgtaaccgatattgatgttgcaattgatagccctcaattaattttagctcttgattatttattttcaattaaatcgtttgtcgattttgcaattcaacaacctaaattggttgttgatgattatatgaaacatcatcaaacaattgatgaaaatttggaagatgaatataaatcaattgctgaaataaacaagaaaaaagatgatgaagaaaatagtgttccatcagagacaaaaacaaattataagattaatattgttgatccatcagttgttttattggctaatccggaaaaggaagattcagatgctgtaattttcaaagtaagtcaattattattaaatctaggtgatattactgaaattaaagccgttggtattggaatgttcttacagaaaatgtcatcagagatgaataataagttaagaattttggatgatttttcatttaaccttaatattgatccccgtggttctaatgcaacctctttcttaacaactattgattcaacaattcaaccgttattgttaagattatcactgcgtgatatttaccttgctctccatattttcaataaggcttcagtgatgtataaagaacaaacagatttattagaatctgaaggtattgaaaatccattgaatgatatcagtaaaaagatttctaaatatgcaccatctatcatttcatcaatttccaaattatcacatcaaagaaggaaatccagaaatattcaacctgttatgatgataaaaggctgaaaaattaaaaattaaaattgaaggtttcagaatggtattaatcggtgatgttcatgaattaccaattttagattttgatgttaaaccatttgagctcaatgcacgtaattggtcaactgaattagaagctgacacacaaattaattcattaattaatatttttaactattcgttatcacaatgggaaccgttattagatccatggtattttgctgtacatgccgaaagatcaactgatgataaacttagcgttaattttgtttctagaaaaaatgctgaatttacaattacttccagatcaattgcaactatttcacattttgttaatttactttctgaacaaggtgaacttaaggaacgtggtgaagattctccttttagaattattaatcaaactggtcacgatattaagatttggattgatgatgctgatgatgccgaagatgaaaatgaagacaaatctaatagacgtcaagaaactctcatcaaaaatttagaaactgttccatggtcgtttgaagattgggctgttgttcgtcaaagtttggcaattaatactaatattcattttattggtgttcaaattcttgatacaaagtatcgcccgctccgtatgttatcattaagaactgaaggtgataatgttgcgatgttagaacctgaattagatgaggggtatcataatagattatcatatgaaattacacttgctgaagacaaagttaaagaagttgttattaaatccactatttctattgaaaatttcacaccgactgctattcatgttggtataggaaatgatcaaggacaattagcaatagacagagagatagttattccacctggtggtaaattagctttacctattgattttgtctataatggtaggttggctgttagaccatcaactacaagtgaaattttcggctggtcagctgctagattagtgggtgatgattctttgactgactttaaatgggagactattagagataacgatattttgttagaatgttcaagggcagaagctaatggggttgccgatttctattattttaaagcacatgctgtttatgataaagacgatgttcttaaccaattatatccacacatgaatataatgatttccccacctttagttcttgaaaatttattaccttttgatattgagtggcgacttttccaaaaaggtcctactaaatggaatgatgttttgaaacaaggtgagacgtgtcctatccatgttgttgatatgaatttcagtgctgttttgaaaattttaattttgggatctaaatatgccgtttctggtgcttcgattatcaatacaccaaatagtatctcaactgttgatagggaaatcaatctgaaaagttcagatggtcaaagattgagtttgaaattatgttattcgtacgatcctaaatatggaactaaagtttcaatttattcaccttacatttttgtcaatagaacagaaagagatctttacattatagataattttaatactttagtctcaaagaaaagaactattgaggaggtcaatgaagctgagtatcccgatatgttttcttttggtattgaagacgaagcttttggtatcttcaaaggtagtttaaaaaatacagtccaacttaaattagaagattcttatcctagtgatggttttagtattgataaaattggtcaatcctttgaagttagagttggtctgaaaactaaaaaccatgagtctgatattggtatccatatcaccgaaggtaaaggtatctacaaattatccaaagttattattgtcaccccacgttatgtcattagaaacgatttgcaattaccggttgtcattggttatgttacaggtgaaaataaaataactgtcgactcacaatctatttccccaatttttgaaattccaacatacggtgacaaacagttacaagttggatttaaagaaggtaaggaaagtatgtcagcaccatttatagtcaataatgttggtgaaatatatttgagagttaaaaagattgattccaatgctcatatgttactaagagtcgttatcaatactgaaaacgctactatttttattaacatcgttgatgcacaaaatatgtggccatattctcttagaaattttagtgaccaagaattttttgtttaccaagcagatccttatattgacaaagatggtaataagaccagtgaccgtagatttgaacctgttttctacaaaattccaccaaagagtgttatgccatatgcatgggatttcccagctgctgaagttaaagagttaattttgagatatggcaaaagagaaagatatattcaactggcggaaattggttctttgatgcctatgagagtcaaaaaggaagatggtacaagtaaaatatttgatttaaatgttattgcagatggtccaattcaagctttaatgatttctgagtatgatcctaaaactagtatgtaccaaatcaaaaaatctcatagtagtgtatccttattaaatggaattgatgctaaggatgaatttgaaactagttataaagatgaaaattattatacatcattattatttgattttgaaggcattggtatatcattagttaatacagataaagaaaatacaagagaattatgttacttgactataaaaggtatcgaatttcactataatgagtcggatatttatcaaaatgcaagtttgaagatgaaatggttacaacttgacaatcaactgtattctagtatgtttcctgttgttatgtatcctactgtcgttcctaagaccagtaatgaattgaactctcatcctttattttcaacatctgttgcaagattgaaggattctacacatggtgttaattatattaaatttgctactgtattattacaagaattgacaattcaagttgatgaaaactttttatgggaaatgttagacttttccaaaattcctggggcagcctggaactctcaagttgaaaatattttatgggataagaatttacaaattccagaacctccgactattagaaccactgatgacttgtactttgagttgctacacttacagccattacaattcaatatttcatttgttcgtagtgaccgttcttacaatgatgataaaaaaaatacacaaaacaatttgtcaattgcagctgatattttaactatggcaattggtaatatcaataatgcacctgtcagattatctgcattaatgttagagaatattcgtactccaattccatatttgtttcaaaatatttctgaacattataaacaggctttcctttatcaaatatataaggttttgggatccgctgatgttcttggtaaccccgttggattatttaacaatattagctctggtgttatggatattttctatgaaccatatcaaggatatataatgacagataaaccacaagaattaggtattggtctagccaaaggtggattaagtttttttaagaaatcagtgtttggtgtaagtgatagtgtttctagaattactgattctgttgcaaaaggtttaacagttgcatcaatggataaagatttccaagaaagacgtagactcaacaggcaagcaaataataagacgaataggccagttgatggaattcaagctggtgcacaatcacttttcactggtatctctagtggtattactggattagcaatggcacctatggaaggggctacgagagaaggtgcaagtgggttttttaaaggtctgggtaaaggtatattaggattaccaacgaaaactgctacaggcgttttagatatggctaataatattagtgaaactatcaaaagtaccacaacagcttttgaaggtaaaggtactgaaagtatgaggttacctagatatattccatatgatggatctatggttagatatgataaaaaggaatcacaaggtcaatattggttgaaaactgtcaacaatggtgaattctctagagataaatatttagcacatttgaagttgcaagagggaggaaaagtttgtgttgttagttattctcgaattttgatggttaagatttacgaaatggagcttgagtggcaaattaaatatgaagatattgaagatgttttattggataaacaaggtattaaaatcaaatataattcgaataaacttggtagaattgatattaaagagatgttcattccagaaagagaggatagaaggtttttgtataagaagattgcaattgcagtgaatgagtataacaatcattgtattatgtcattgtaatttaagtgttagtgtttactttcgtatattgttaaataaatagattttagataaagtaattatcagtattgttaaactttttcttcaaagatgagataaactttgaaggggtatctgatccaaaaccttcagttttcaactcattaacttttatgaaaccatcagaaaccttaatctctaatgtagagtcgtctaacaaacggaatgaaccattaggtaatgatgaatcaagaggagataaacttggttggatatttcctagaacaaccctttttgttgtagcagttgatttctttttggatatacatggtttaaaggtatgtagtttgtgtaatactccatattttctcataatcgattgaactgtagcattcttccatataatttggttatctgaagatgaaactttcgcagcatacgaaaatggtaaatcaggttttaatactctgtaatttggatttgacttatcaaaaagtgactttttgacgatatcgttcaataaagtctcctcccataatagctaaggtttctgttaatgaatctaatgtttcattttcttgaattgtgtattcctctctggctaacacgtcacctttatcaaattctgttgggtgtagtgtttgtactgaaacaccagtaattgaatcattatttagtaatgcacgatgtaatggagctgggccggaatatttgggtaataatgaaggatggacatttaaaccgccatatgttaatgaagataaaaatgtggatggaataagtttaccatatgaaacagcaatacataaatcatattttccctttattgcttcaaattctgccttggagtcaacacgcagaagattgatgttattctgattagcaaagtctgcaattggtaagtcttttaatgatagtagccctcttcctgacggttttgggtgacgtgtgacaatatcaagcagaaagtttgagttcaatggtaacaatcgtttcaggcataaaatactgaacgtgtctgatccaaaatacgctaatctcatgatgtattttattaatttaagaaataaagtatcctaatcgggtaataaaaaacttgctttaacaaaatttccatgctgaaaaaatttatatgttgaaattttcatgtttatgattacatgagaacttgagcatcgtttcataatctaaatttctattgcctttactaattctgtttctttaagacaatgctcgctgagacactacaacaaacactatctatatccgatcttgaggagggtaaagttgattcagaggcagtatctaaggcattagattcgcttatggaatcacttggtagaatacgggcggaaatgcatgaagttttacaggaagttatcatctcttagtgaagataaaagttcatcaaaggttgcctattagtttaggtgaaaagctggttcaattacaacaagaaatgagccagttcaaagattcctatgctaaaataagaccagtgatacggtacttcaagatcaaacagggtatcaatccagattctggtactacaataacgagccacccggtagtctcatcgacgtgacatttgcgagaggaggttttcccccatcaaagcactgggcagtccccactaatattccatatattttacccagccctgtccatttcttacccatcacagtgactcaccctgactgttgggcgaaaaacatcttaagtgtgaaaaccgtttcttactgaaatttcaattattaatggttgatttattatttttatattcctttctttgtttagtggtatataatctatttaactctttttcatatcacaaaaaaacaatgtctgctgatttaagaaacgcatttgtcaaggctaaaaatgaaggaagaaatgcactggtaactttcgttaccgcatacttccctgaagaacaagatacaatcccaatccttaaaggtttacaagatggtggtgctgatgttattgaacttggtattccattctcagatccaattgcagatggtcctactattcaagctgctaataccaaagctatcgaaaatggttgtactgtcactaaatgtttaaatttagttaaagaagctagaaatcaaggtgttaccatccctattgtcttaatgggttactataatccaatacttaaatatggcgaagaagaatttgttaaggcttctcaagaggttggtgctaatggttttattgttgttgatttacctcctcaagaagctgttaaattcagaaatctttgctctaaatataccctttcatatgttcctcttgttgctccttcaactactgatgatagattacaaattttatctgaaattgcagattcattcatatatgttgtctcaagaatgggtacaactggtgctggtgtttcagtctcttcctctgttggtgaattatgtgctcgtgttagaaaattcaccggtaatacccctattgcagtcggttttggtgtctccactagagaacattacttaaatgttggtaagagttctgatggtgttgtcattggttccaaaatcttgaacttaattgaaagtgcaccgactggtcaaagaggtgaagctgctaaaaactatgttcactctattcttaatggagatggtgataataccgtttctgattctaaaatctctaatgaagttaaccttaatgataaaccagctttcgatgaaaaacatcttcataatccaaattttggtgctttcggtggtcaatatgttccatgaagctttatatgcatgtttaagagaattagaagatgcatttgaagcagccattgctgatccaactttctgggaagaattccgtgctttatatgattatatcggtagaccatcatccttgcatgaagctgaaagattaactgaatatgcaggtggtgctaaaatttggttaaagagagaagatcttaatcacactggttctcacaaaatcaataatgctttagctcaaatccttattgctaaaagattgggtaagaaaaacattattgcagaaacaggtgcaggtcaacatggtgttgcaactgctactgcatgtgctaagtttggtatgacttgtaccgtttatatgggtgcatgaagatgttagaagacaagctcttaatgttttcagaatgagaattttaggtgctaatgttgttgcagttgaaaatggtactaaaactttaagagatgcaacttctgaagcttttagatcttgggttgtcaacttaaaatcaacttattatgttgttggttcagcaattggtcctcatccatatccaactttagtcagaactttccaatgcgttattggtaatgagatgaaacaacaatttaaggcaaaagaatgatggtaaattacctgatctggttgttgcctgcgttggtggtggttctaactcaaccggtacattttcaccatttgaaaatgatttatcagtcaaattgttaggttgtgaggctggtggtagtggtgtcgatactgattatcattctgctacattaacagctggtgaaccgggtgtcttccatggtgttaagacatatgttttacaatcaaatgatggtcaagttcatgatactcactcagtttctgctggtttggattatcctggtgttggtccagaattagctgcatggaaagattctggtagagttgattttattgcagttactgatgatcaagctttagaaggttttagacttctttcacaatatgaaggtattattcctgcattagaatcttcacatgctatctatggtgctgttcaagctgcaaagaagatgagtaaagatcaaaatgttattattactgtctctggtagaggtgataaagatgttcaaagtgttgctgaagtactacctaaactaggtccaaagataaattgggatttacgtttcgaatcatttgatgatgcaagtaaatagatcatgtgtgacatgttatgtatacttcggatgcaaaaccttataaataaatttgaaagattgtgtgactgtatattttttttaaaaaataattttatcaaaataactaaacatctttatatttacaaaaatagatatttttgttaaggctttctactattaacgaattgaataaagccacccgtaaaggcagtcaacaagacaaagcatattgagagtgtggttcgtagatccaattcagtcgtgtccatctgtctgtgtcatttattgcctcaacatatgattgtaattaagagaaagaaaagatgattaataatttgtaagtaaatcaaaaaaaaattgaaacggatctatctcaaaataatttttttgtgtttacatttttactttttaacaaaacataatttatagtttcatctgatatattaataaagcaattaaacacaactgcagtatatgaacttttcatgctaccccatgcttcagatttagggatttctgaatcttttggaacatcaaccattgccaatatcgatgtcaagcttgacaaagatgcaaatcattcaattaattttaatttcccaacaggatatctcttcaaatgttgggcatcgacttcaatttataaggaaaagtacaaagaaaatatgggacccagcacttgagctcaaatttatagggcaaggagagcaagaatcaaaaagatcacaatatattgtaggatctagtaagtttatgcttgaatccacagatgaaaaaattttaaaaaccacattagatccaactgttcacaacaccacagcaataataaaactacaagataagaatataatagcaacaaatttaggacgatataataatgttttggcaattggttttgtagactgatataacacagaaatttaacaaacaatctacaactcaacacaaaccattaaagtttacctctcttaaatcattgactttccctgatgaaattcaacaaatacagtcaaatatagttgatgactctacaagtttatttttagttcgaacctcccagtctgtgtatgtcctcaaattttactttaataagacattcaagctttctaaactatttcattttgagaaaactgaaaaatgggcttttctatctcatgcatcactattagtaacgggtaataagttgatgatagcaattgttgactgtgttggtaaattttctgtttttcgtggagacagaagttcaaagaaaattacatttgccaaacttaacttgaactttcattcattttatgatccagttgatttgtctaactacaaaaaaacggtgtggataaatgaacaccgtttgattttactttcacgattccaactccatgaatatagaataaatcataggaattatgaccaaatggatggatctgaaaattttaacgaagatgaagatgatgtaaaaccagaaaaactcttctgtagaatatgttcaggaacgtggtctaggttgcttgatttagtacggagtgcaatcgatccaaaatatttttaccttttgacaaccaaagaaataattatcatagatgttagcttagggtttaaaagatgtgttgcatggaaacattttttcaatgaaagtgattcatcaatgtctttgcagacgataattatgaaagataccgaaattgttatagtttcatcaaagaaatcaaatttgagttttgttttggatttttccctcaatcaaatgaagctgataaatcatccatatctacttataccgtatacgtccacaccagtaataagtctaggtttccatagattaggaacacctgatcaattactttgtattcaaaaactaagtacatccaccgttgtcatatcaaaaatagagtacaaacaactagaagacaatcgcataattaggcacagaaaccaacacattgaaactaatgaaattattaagccagatcgccttttttctttagatattcaatcattatatcaaacaataaataattctgaaattcagccaatcgactcctctccacaagcaacagaaattactgttgaaatttataaaaagttagaaaattatttagaaaggtctacattgacatttagttcattgtttcaacttattggtagtattcatattccaagaaatattaagaatacatttaagattgtgcaacatattatacgaaatgataaaaatcaacagctgtctattcgattactgaataatcaatggtattgtgataccaatattaattatcatctagagtctgatgacgatatttcattacaatcagataacattttagaattttttaaatcgataaataatggagagacttcaccagacataattttgaatttgatgttaagtttgattggtgtttggaagacatataaaagtttagatgatgcaatgatagaggaagaacttgatgattccgttgctgatttgcccaaaaactatcaagaaatggttaaatcatttcaggatgattttaatgcaattggtataatggattcagaagaagaagagaaaggatacaccagtactgatccatatatgggttcattattatcaatgccttccgtgtcagtatcacaaacacctccaggttattggaacatctcaattagttcacccaaaagtaagacaaaaatcaaatggaaagtcaaaatctaaattcattcctaaaactacgattactaccgtgaaaaaatctgaatctaggggtactactccaatgagttcacaacttaatatacttgaatcgcaatcccagggaaattcaagactcttgtcacaaacaaggtcacagccaaaaacatcagttccattgagtcaaaaaatgtcacaacaacctagttttggattttcacaatcacaatcaaaaggtcctagaaagaagaaacgtaaaacaggattctgattttaaccactttatagaatttgtatattattatggagcattatagaattatgtgtaaacttaattgcatctacaacattttgaaaagaaactgaattcatgtgccagttagagtgcatgccgtctgatgaaatttcattcactgctgtaacttctttatctctagaacttactgatgaattatttactgtataatcatggatggagtcctattggcattactgttgatatgttttcgattgacaaatgtcatcagtgaacttattgaacccaattttccacaagatgaatataataaaatcaactccaattcactactctggggaccatatcgatccaacttatatttaggactcaggccacgcatacctgactctatattaactggtttattatggtttccagcagatacattccatggagtcttattatcgaaacaatcatgtgatcctaaacataatatcaagaaatttggttggactgactacgatcccagatatggaggtatagaaactattgttgatgatgattgtaaattaaacatcaccactgaattcgtgaaaagtgatgatggacagaattgggttttaagagttaaaggcaagactcataataaacattcgataaactcaattgtttatcatgtaggaatgcaggatggtgagttagattttgatggtgaatttgctggcggatcaaataatttggtggaagaggatgtcaagctaaacggtaacttaaaaagtttaggtggaatgtttgatattaaaatcattgatgacattgataatgtaatggcagtaagtaataccattgattttgacaacagctacgatccatcactgacacattatgtctcgttgactgtgccgaaagatgaagtttggaaagcaagtgaaattttctggacaatagttaagttaaatcttgaacaagttagaaactgtggataagacaacgtatgagttttcacctattgagttgtttcagattagaaattcttttggattcaaaggaaattcacattttattcagaaaacgtttgtaggtgatttccagtttgatattgttttcaatatgcatgaatcaaatgataagtttgatagtgatgatttcactggtaagctgtatgaaacgtttaatttgattgatgataagttcacgagaaaatatcaattaagtgtaccatttaatacacaagaatacatcagttttgctaaagagatactatcacaattattgggtggaatcacttatttaaatgatgatcgaaaaataaataaagatgaaatgaaggaggattcagttcatataaattcaaaaatagaaggtggtaatgaaggaccatatgagttatttacatgtgtatctagtagattatttgcttcaagagggggatattgggatgaagggtttcatttattaccaatttgtgactatgattcagacttagctttagaaatcattaaaagctggattttattaattgatgatagtggttggattgcaaaggaacaaatattaggtgatgaggctagaagtaaagcatatgccgaaacaatagtaccaaatacacatattgcgaagtcctccaactttaatgcttgccttgagtaagataatcaagctgtctgagagttcacaaaatgtcatagatggccatgcattggcttctgatattttagacaaaaaaagtttaggctctttacatgaagaaaacatggatttacttgtattttacttgcgtaaactttatcctaaacttcaaaaacattacgaatggtttagggaaacacaaagaggtaattctgatgaaattgaacgtgattattcaaataataaagaaatttacaggtggaaagggcgtggtgaagatactacaccacctagtggtatggatgattatccacgaggtgatgttgatattggagaattaaacgttgatttgttatcttggatgggtttgatgactagatcaatgtacgaaatagctgaaattattgaagaatacgatgatttgagaacatacaaagaaagatataatgatatcgttaagaatattgttgatgtccattggtcagaaaatgatgaaatgttttgtgatgttaatgttgatgaagatgacaatgatatatttgaatgtcatgaaggatatgtgacattaatgccatttattcatatattgattgattcttctgacaatattaaattggtaaaaattttaaaagcattgaaagatccatcaaagttatggtcaaattacggtataagatcgttatctaagaaggatttgaattaccacaaaggagatgattattggagaggtaatatctacgttaatatttaattatttgatactagaagcattgtatcattacggaagtgatgaaaatgtaagtgaagaagcaagaaatttagcaaatgagatttatgttgaattacgtgagaacattgtcaatactgtgttcaacgaatataacagaacaggttacgcttgggagcaatataatgaagagaatggagttggtgaaaagtcaagacactttctaggttggacttcgttagttgtatcaataatgaagatgccaaaagaaattacgtaattattgatttcattcaaaggggggggcgataagaaatttcaggatatttgctgagcctccggagttgtaccttttgttccttttctttgtcttttcttcttgtaacaatacgatgtctagtaaaaagaaggttgagaagttgggttatgatgaaggtaggtatcctgtataagtatattaactgttttaataggataataatagaaatataatactaacaatttgaaagcaaaaaatgttgttattgagtatatggagaaggagtacagaccatactcagtaactgatttagttcttaatttacataatcgtataccaaaagcattaatgatcaaaattcttgatgatttagttgatgagaatttgatgattgttaaaaggtatggtaaattagcgtattactgtaatgttgagaggaaattagatgaaaatattataccaatatcacttgaacaacttaaagaattgagtagtgaaattgaaattattgataaagatgtttcacaatacaagggaggtatgttatttgtataacttttcctttattttgacttagaacagtatactaactaaccaaatatagaaattactaaattgaagaaatgagctgacagatgatgaattgaagaacacggttgaaaacttgagaaaaattcaaaatgagttgaatgaaaggttagaaggtttgatgaaaatacataatactcctaaagatactgatactgatagcagatttagggaaattgaagtaaatgaaagcaatcatttaagacaatacaagaagatgaagaaaattgtaagtaactttcaattctatttaacatatcaattaacagcataatactaaccatattaccgataattacagcatactgagattgtcaatacattaaaggaaggtgtgcctaactttaaggaacagatggaattattaggggttgaaactattccaaatatcttactatagaaaaaccaccaaaacccagccctcttagcgctcacgtgactttgccctttttcctacaataaaaagaaaatttgcgtgctttttttccagcagttataatttttcgctcagttactagtaacatgaaagatgatgatattttttttcagatttttcatagtgcttaattttaatatagagttgtagatctaaataatttctttgaattttagaattttagaattttattttagcaagtataaccaagatggctccaaaaggtaagaaggttgcaccagcaccattagctactaagtcctcaaagactgcagcagcaaagaacccattattcgaagcaactccaaagaacttcggtttaggtcaagcaattcaaccaaagaagaacttatcaagatatgttaaatggccagaatatgttagacttcaaagacaaaagaagatcttatcattaagattaaaggttcctccagctattgcacaattctctaacactttagataagaacactgcagcagaaactttcaaattattaaacaaatatagaccagaaactactgctgaaaagaaagaaagattaactaaagaagcagcagcaattgcagaaggtaagaagagagaagaagtctctgaaaaaccatatgttgttaaatacggtttaaaccatgttgttggtttaattgaaaacaagaaagctaaattagttttaattgctaatgatgttgatccaattgaattagttattttcttaccagctttatgtcaaaagatgggtgttccatacgctattgttaaaggtaaggctagattaggtactttagttccatcaaaaaactgcagcagttgcagctttagttgatgttaaggcagaagatgaagctgaattagctaaattagtttctactattaatgctaacttcaccgaaaaattcgatgaatcaaagagacactggggtggtggtattatgggtcaaaaggctcaagcaaagattgctaagaaagctaagattgctgctcaagctgttgcagctgcaaaataattaatttaattataaagtaatatatttgtaatagaattttttaaacttaaaataaagtaattattaaaaatttagtaagtaaaaagtattattgcatttatattataacaaagagtgattggtaaggacattgacttttattttgtacattaaagttataatatagtagaaattcaaaatattaagattctataattttaataattttataattttagctttagaagatataaataatataatgagaaaatgtattataataaataatataaaaatgtaatgataataatgatataataatatatgacattaaataatgtttaattttaagaaaaatgaaatacaattgacattagtgattgatgtttagtttttattatcattaagtttatttttattcaaatttgaaatttgaaaatgattctttattgaactgaaaatggaatttatgattgatgatgaatatagttttaatatattttgagttactctactagaatttatgcaaaattattttaattttgagaataattttggagcagcacaatcagtaagagcatgttgtaaatggaagaattcttcaacacaatcttccttatattctttttcatcataacctggttcttcttgttctttagtaactctttcaacacattcttcataatgatgaaggattggtttaactgatggaagttgagagcattctttttttaaagcatcgaattgatcttcactttcttcttcatcttcatcatcttcgtcttcttcttcttcttcgtcatcatcttcttctgcttctgcttcttcttctgcttcttcttctttttcttcagcaggtgctacatcaacaacatctttagttgattcttcaacagttgcgtcttcagatacttgttcaacaggttcttcagcgtaagcaacagttggaacaaaagcgttaattaaatcagtaacaaatgacatattattaattgttatttaatgaagaattgacagggataataataattacaacttcaattaaaattaaaattaaaatataaaatcatcgtaatatggtgtctataatgaaatttactattataataattcaacatgataatttactatagtaaaatgagtagcgaatagtgaatttagcaatataaataacgattcaaacgatttaattggttaacaagaaattttttctttaatgattatgtcagcacagtcgcgtctttaaattttaactttttgcagtcgcgtctgtctggttacgtaatatttttattgaaggatcatgttgtacaaggtataacaatatcaatgatagaaaagaactattaaacaattatataaaggtttatacaaagaaagctgctgaaagacaacaagacaatgagtcttgaacaagtacttcactaagctagctgaattttcaatcacatatataatacgctgtttggaatgagtccagaagaagctgctgaaagacaacagaacaatgagtcaaggacaagtactttacctaggattttttcgcctgattaaaagaattaacacatacttggcttatcacaatgattcgtctgatgttgatcctgaaattgctgctgcatatgatgctgataatctaaaagatttatttaaatatctttcgaatatttcagacttgaatagtaaaatcctttataaggaagcgataaaagacttccgttgggatttgaataagaatgaatgggttgctagattaatgcaatagcatttgttcctcctgttacacctcttgcaaaggataaaaataaatactttgtctatttgttgttgaattcagtgaaaggacctacatcatttgatgatttgaagttcggtcatggtacgtatgaggaagcttgtattgcacttggttttgttggttctgatgaagagtatgttaaatgcgtcaaaactttaggaagaacaccacatgggttaagattatttgtaaacattttatttttaagtttatccattttgaacacttctggtctatatgtaaatgttctttatattattattgtttaatagaagagtgatgtcaattcgaattgatcaaatcgacataccttgaaagaaaccatcaagaacacgtagtttagcaattaaattaaaatttgaaacttcaacttcaactacaagtaacaaatttggcgaccatcaccagccaccacaaagtcaaaaattcacaaaaatttacaccccgtctccccagccactccggagttaaaacaaaacagaaaatgccataataattaaagtgggaataaatttccgagttaattaatattaatattaattagataagcagatgtctattaaaggataagtctgttattattattattctgtttaagttcatttatttattaggtaattgaccaatggtatgaacccgtttgattttctaccttttgtgtggggaatatagtctatttaattactgttacatttgttataactatactattccttattttattttatttcattttattctattctattctgttcaattcacttcagttcattttattttactttgtattacatatacccttcgtttgttaattgagttaattatctcaactatcattaatctctctctggttaccttaacatattattaccttctcaattagacctttctttcttttaacctttcaattctttctcatttaatatatatcagatcattgtcatctcacttgcttatagtaatacaatatacaatgactgtcgataatactacagtcgctcaattacataataatgaaattgatcatgatcaacatgatcatgattcaactgataaacagattattaaaaatgataaaaatgataaatgataatgataataataataatagtaccactcaaaatactgaccaaaatactgatcaaaataccaccaccgaaaataatgaaaataccgaaaatgatgaaaaattaaatattattccagacagaatctttgttggtaatttaccctatcaagttactgaagatgatgttagaaatttaactcctgaatttgatgttttatcagttgaaattccaagaaagcaattccttgataaatctcaaaataaatatgttttacaatcaaaaggttatggttttattacttatacaaatgcaattgatgctaaaaatgcaattgtttcaattgaaggtaaagaaatttcaggtagggaaatttatgctaaatatgcattacctcaaaataaaaataaaatgaataataataataacatgacaaatcattcatttgatggaagaaatcaaaatcattttaatcaattcaatcaacgtaatcaatttaataattttaaatctaaaacttattattataatataaactatcaaatgagaaataattcaacaagtcaacaaccttattattattcaaatccttatgagaatatacatattcaaccaattcctttttatccgaataaaaatattaatggtagtaataataactcaaatactacaataacaccacctactacatcatcttcaaatacaccttcattattatcatcaccaaatccaaataataatacaaaaccaaatgtatcaagctgatgatgaaaataatactactactaatgaacaatctaatgaaacacaaattaatgaaacacaaactgaagcctgaaactgaacttgacattgaagttgaaattgaaaatgaaaatcaagcagaagaagataatgaacaacaaaataatataccgacatcatttttttcaaatcttgataataaaagtatcaaaccatttttcccaactccaattgaaataataccagttatgagtattcaatccaatgaatccaatgaagtattccaattaaccccttatccaatcaatccttatcctatcaatacatacccaattaatccaaatatgaatatgaatatgaatatgggtggtatgaatatggggggtattaatccaaagtatcaatatgaatatgaagtatctaaataataataatctataataataatcataataatgcctagatcaagatcaagagatagggaagaaagacaacgtaaattagctaatggtaaaccttccaaaagtattgtatttattggtaatttagatagggatgtaacaataaatgaattaactgaatttttaaaagattataatccgaaatgggttaaaataccaagaaagacaatccctaatgaaatgtataaaatgttgaaaaataataatattaaaattcaaaataggggtataggatttgttaaatttgaaaatgaagaaactcaaaaagctgttattgaaaaatttgataatgaaatttggaatggtaaaaaattaaatgttacagttgcaattaatgcagaggatgatgaggaagaaaaagaagaaggaatggtaggtgaaggaaaaactgatgatgatactacaaatgatgtagatgacgatgatgttgaaattgaagttgtcgtctctgatgagtaatcactgtttatatataatactaataatatctatataatattatgtatgatatatacatgatattaacctgataatattaatcatcttaataatcatataataattcatgataataatgcattctctgataataatagatctcttaacagatcgatttgatgcgcatcctttgataatttttttctgtttcttctccttatcaaccgtttaaatttcctactgtattatttattgatgagccaccgttctttttttgatatattgttattaatttggtagagtgcactataaaaaatggtatgaaaaatggtatgtgttgggggtaatgaagctatattctgaagaagtgtgtattttgatactaacgtaaagtctatatgttatctattaaaattatggtctaaattgtgataacaaaaatgtatttgatcaaagaatcctgcaaataaaatttaaagcccataactcaactctcatgactattggcatattgtagtcattcatcacaagtaatcttgtaaagcactaccttaacaatatccaatcccataagtcaatggaatccaatatatcacgtgattgcaccaagggctaagagggctctcatagaaataataaataacttttcaaattggaaacaatcagccatattgaaatttttcactgttacgtaaggttttccaaagtgtgtgctattattatactctactgtttaagatgtatgactctaggatttacttagtttcaagaaccaaagatgggtagagttattagaaaccaaagaaagggtgcaggttctatctttactgctcacaccagattaagaaagggtgcatgcaaagttaagaactttagattatgctgaaagacatggttacattcagaggtgtcgttaagcaaattattcacgatccaggtagaggtgctccattagctaaagtttcattcagagatccattacagattcaagttaagagaagaaactttcattgcaaatgaaggtgtctataccggtcaatttatttactgtggtaaatcagcaaaattaaatattggtaatgttttaccattaggttcattacctgaaggtacaattgtctccaatgttgaagaaaaagttggtgatagaggtgctttaggtagaacttctggtaattatgttatcattattggacacaatccagatgaaaataaaactagagttaaattaccttctggtgcaaagaaaattatttcttctgatgcaagaggtgttattggtgtcgttgctggtggtggtagaattgataaaccattattaaaggcaggtagagcattccataaatataaggttaagagaaactcatggccaaagacaagaggtgttgcgatgaacccagtcgatcatccctcatggtggtggtaaccatcaacatattggtaaggcttctactatttctagaggtgcagtttctggtcaaaaggcaggtttaattgctgcaagaagaactggtttattaagaggttcaaaggataagaacgatgattaaatttttttgtaagtattaattaatcttaaataatgtttcatggggtatataatcagttttataattaaaataacagtaatagataatgactcattatactgattgatgattgataattgataattgataacagaaaaatagtaactactaatactgtggatgctgccttgtacgtaaatggcattagttatatagtaatcacgtaatagtcataattattaaattgaatttttttacagaataatattttcaatggcaaattttcttatcaatttaacttaacttgctatactttatcttaaactttatcacaaattaatcgtaactcattcacttcaaacaatcaaatggatttcaatcagggaagtgaacaattcattctgtgacaaggtttggctggtggacgattttacacgttgttcaagacatcaaatacttgaaaagtatataccgttagtggtaataatattatcaataactcatatcctttattatattgtaaaacataatatactcaagtcctcaattcaattggatttgaatttaccagtacaagatgattcaattgaagaagataataatgttaccaattatggctcaactgctactactcttaaagatgatgatgatactacagattccactaatgatactatactagaaaaacattttagtataaaatatttaaattataacttccaatacaagtaaaaaagttgcaacataaaattgttttcagaactttccttgaacgtacaatgttatttgttcaagaaattttatatttatcattaattgcattatcattatccccatttgttatttccgatttatcaaaagaatgggaatctccaatttatccaataataaatgctgctttttggacatatcttttcatcttaacttcaattagattggcacattcttcaaatggtttatccttaagctatccagatttatggtatcaaactttcaatttaatcatagtttcattatcaattaatttttttcaattccgttcagctttattacatcatactttaaattcaaaatctgatatgttctatatcattcaattcactattgttacaataatttttattattcaaggtttaggatcattttactgatagacctgtaactgttttaataaatgaaggtttaattccttcacctgaatcacaatcttccttttttagtgtatttggattctcttggttaaattcaatgattatggatgctcgtaaaagattaccaactttagatgatatttggagtttgaaattagaagataatgcatatccaaccgttttgaaatttcataaactgaagtggcataaaagattttcagttaatttattctatcaatttagaaaattattcatttaccaatctatacttacctctttagaagctattttaacatttttcccatcaatgttattaaagaaaatccttgaatatgttgattctcctgataccgaatcagcaagtcttgcatggttattagttattttaatggttttttcagcaccaatttcatctggattgagtggtcgtggtttgttcttaggtagaagaatttgtactagaatgagagccattttaatcagtgaagtttattcaaaatctttaagaagaaaagtcgttgcttcatcgggtaagaagaaagatgataacgaatcaactgatgcagaatcatcagaatctgataaatctgataatgaagattcaacaagagatttaggttcaatcatcaacttaatcgcagtcgattctttcaaagtttctgaaatttgtggctatttacattattttgttaattcatttgttatgacagttattgctattactattctttatacattattaggttgggcagcattagctggtgcagcaactattgttgcattaatgccattaaattataaattaagtatgattttaggtaattatcaaaaggctatgttaaaagttactgataaaagaattcaaaaattaaatgaagcattccaaaatattagaattattaaatattttgcatgggaatctaaatttgctgaacaaattcttaatgttagaaatgatgaattaaaattactttggaagagatgtttcatttgggtgattgcatgctttgtttggtatatcactccaacattggtttgtcttgttgcattctattgttataccgttattgaagagagacctttaactacaccaattgcttttactgcgttatcattattcaatttattacgtactccacttgataattttgccgatatgctttcattcgttgttcaatcaaaggtttcattagatagaattgaagaatttttggaagaacctgaatcatctaaatatgaacaattaatcaatgaaagagatgaaaactctcctgatgttggttttcaaaatgcaactttttcttgggatgttgatagttcaaatgatttcaaattgagagatatttcaattaatttccaaaaaggtaaattaaatgttgttattggtccaactggtgcaggtaaaacttctttattattagcacttttaggtgaaatgacattaattgatggtaaagttttcttgccaggttatgttccaagagatgatttaattgttaatagtaaaactggtttaactgaatcagttgcatattgttcacaaactgcatggttattaaatggaactattaaagaaaacattgtatttgctgcaccatttgataagaaacgttatacagcaacaattgaagcatgtggtttaaaacgtgattttgaaattttagctgcaggtgatcaaaccgaaatcggtgaaaagggtattacattatctggtggtcaaaagcaaagagtttcacttgcaagagcattatattcaaatgctgcttatgttttattagatgattgtttatctgctgttgattctcatactgctgttcatatttatgaaaactgtattactggtgatttaatgaaaaatcgtacatgtattttagtttctcataatgtttcattaacaattaaagatgcatcatatgttgtcattatggagaatggtagagttaaaaatcaaggtactgttgaaaaaatgttagagcaaaatgcatttgatgatgaaacaactacttctgttatgcaatcaagagttgcatcatccgttaatttagctgatatggcaactgcagttgaacctggtgagaaccatatacgtttattgaatagtacagctgcagctcttgaatctggtttaagtgctgatcaaattgattccgaacctgttgaagatgacgttcaaattgatcaatcaggtaagctaattgaagaagaaactaaaagtgatggtactgtttcatttgatgtttataaaagttattttgttgcatttggtggtccatggttatgggcactattgttatttgcattcatttcaactcaattgattaatatttatcaatcttattggttaagaatttgggctttaatagagaatgataaagctggtgcttctggtatgattgtcaaaagtgttgtcgaaaaagtttatgctaaatctgattttgcagtcactaatgttttatcaattttgaaatcaattgaatggaataaaccaattttacaaacaaaatataataattttgatgtttctgaattttctgcaatccattcaacaatgtattatctttcaatttattcattaattggtttattatattcagccatgggttcattcagaattattatggtttactttggtggtttgagtgttgcacgtgaaatgttccaaaccttattgaaaaaagttttaagagcagaaacaagattttttgattctactccaattggtcgtattatgaatagattttctaaagatattgaaagtattgatcaagattttgcaccatatgcagaagctttatttatttcagcacttggttgttttagtactttaattttgattacatttattactccaattttcttcatttttggtattgtggttgttttaagttttggttatgttggtgttctttacttaaacttatcaagagaattaaaacgttttgaatcggttacaagatcgccaattaatcaacatttcactgaaactttgaatggtgttacaacaatcagagcttatggtgatgaaagaagatttattattcaaaacttagaaaagattgatacaaataatagaccatttttctttgtttgggctaataatagatggatgtcatatagagcattaatagtaggttctttaattgttgcaatttcatcagctctttccgttttagcagcacgttatattgattcaggtttagctggtatttcattatcatttgcttcatcctttgctgttagtgcattatggctcttacgttcatatgctgatgttgaaattaatattaattctgttgagagagttcaagaatatattaaagatattcaagaagaaagtgctgttgaaactgaatttgacccacctaaatcatggccagaaaatggtgaaattaatgttgaaggattatcattgagatatgcaccaaacttaccacttgttatcaaaggaatttctttccatgttaaccctggtgagaaagttggtgttgttggtagaacaggtgcaggtaaatctacaattatcacaagtttctttagattcttagaacctgaaaagggtaaaattgttattgatggtgttgatatttctaaaattggtttaaatgcattaagaaaaggtttagcaattattccacaagaaccaacactatttgcaggtacactaaaatccaatttagatatgtttgatgaaagttcagatcttgatatttatgaatctttaagacgtgttggattaatttcaagggatgaatacaacagtttaaagactattattgaaagtggacaagatatcaaaattatgcaatctgattcaaattcaaatgaaaacacttaataaatttactgatttagatgcagaggtttctgaagatggtggtaatttatcccaaggtgaaagacaattaatttgtttagccagatccttattaaaaagaccaaaaattttattgttagatgaagcaaccgcttccattgattatgaaactgattcaatgattcaaaatacaattagagaagaattttctgacagtactattttaacaattgcacatcgtttgaagacaattattgattatgataagattttagttttagatcatggttctgtcaaagagtatgatcatccatatcaattaattcaaaaagctgattcacaatttagatcaatgtgtaaagatacaggagaattcgaagatcttgtaaatttggctaaaaaggcatacgaatctaaacactaatctaatttacattttgtactagctgtacttttgcatcctatataaacttttatatttatatccatattataacccagactacatttttaataacattttataaataaacttatcgattatcgcaatggtagcaaacattagcattaaaaatgtttacgtcagcaaatcatgaaaaaatatctgggatgtttattttttgcccaaaaaggaaattatagaaaacttttatttccaaactttaataacatgcatactctaaattgaaggctagcttagtttcatgatagatcagaaatcacaatatgtcgtttatttcttaaaacaaaaatagaattttacttcttttctttttgaaattgacttagagaagcaagaaaccatgtctgatccattcagggagaatccattcagggttttgcaatctccggttaaaaagccggaggactcatatactccaagtaattcaccacaaagaaattccccatcaaaagcagctatgaaatattctccagctgtttcttttagaagagattcaaataattttgtcaatagtacagttgggcgtaattttattcaaagagctgatgaatcaccattaagatcatcaactgctcgtaaacttttcactgaacaagaatcaccgaaacgtcaatctgttctctctacaattatagatccatttaatgatactgaaagagaagatgaaaacaatgagattgtcagtcattattcaattttcaatcgaagtccaagaagaaacaattcagataatcgtaatatgttacaaacacctaaacccgtgttctctcaaaattcatatgattatgcccaatatgataatgaatcattaggtaatattccaatgttaactccaaactcatcaattaaaagatataacattccccagcaacaagtagatggtagtagagtttcctctggtggttccgaaatgacaatgggttcatcaatgggctcaaaaatatctaagacaaaaagtagtgtttcatcctatttttcatcggatcaatcaacaattaatgttccagaagatggagattttgaatttccaaatggatcaagaatgtcaaaaatgtctgactctggctctgattatttcgataaaaatttaatggacaaagcaccaatgattcaaccaagaagaaataactttcataataaacagacagtatttagatcaagaacaggtaatcttgttttagatactccaattccaggtttacttcatgatttattaccattaaagcatgctgatgaatttgattttatgaaatattctgctgtcacatctgatccagatgactttgttgaagatggtttttcattaagacaaattgagttagaaagagaaacagaaattgttatttgtattacaatgtacaatgaagatgaagttgcattgacaagaacattacatgctgttttcagaaatattgcttatttgacaagcagaaagagaagttcaacttggggtgcagattcatggaaaaaagttgttgtttgtattgtatctgatggtagaaataaggttagtcctggtattttggaagttttaggtactatgggtgtatatcaagaaggaattgctaaatcctttgtgaatcaaaaggaagttaaaggacatttatttgagtatactgcacaagtttcagttaatgaagatttaaagattgttggtggtaaagaaactacaccagttcaaatgattttctgtttaaaagagaaaaatgcaaaaaaaattaattcacataggtggttatttaatgcaatttgccctgtcttaaatccaaatgtttgtgttttattggatgttggtactagacctaatgatactgcggtctataacttatggaaagcgtttgatttagattccaatgttgctggtgcagctggtgaaattgttgcaatgaagggtaaatattggtcaaaattaataaatccattagtttcatcacaaaattttgaatataaaatgtcaaatattttagataaaccatgtgagtctgtttttggatatatcagtgttttacctggtgcattatctgcatatagatatgatgcactgaagaatcatcctgatggtaccggacctttaaaggcatacttccaaggtgaaactcaagatagtgcagatatggcaaatattttctctgcaaatatgtatttagcagaagatagaattttagcatgggaattagttgctaaaaaaggtgcacaatgggttttgaaatactgtaaagatgcaaagggtgaaactgatgttcctgaaacattatcagaatttgttcttcaaagaagacgttggttaaatggtgcgttctttgctgcaatgtattcattaaaacaatcatcacaaatattacaaacagatcattcagcaatgaggaagtttttcttttatattgaattcatctaccaagcattatcattaattttcagtttcttttcaatttcaaatttctatattacattttattatcttgcaggttcattgattacaattggaggaacgggtggtaaaattttctttgaaattatgaattatatttgtatttgtacattattagcaatgttagtgatttcaatgggtaataaaccaacaggagcaccaatgttattctgggtttgtgttattttactgacaatttgtggtatgtatgcaattatttctggattttatttcttatcattaatgattaaaagtcataatgctggtacagttggaggattaagctttgcatcgatttgtgtttcaatggcatcaacttatggtttatatgtgttaatgtcattcctttatttagatccatggcatattttttcatcatcaattcaatattttatgatgttacctgcatatacatgtttattacaaatttatgctttttgtaatacacatgatgtttcatggggtacaaagggtgatactgaagttacaaaatctttagggtctgcaattattgaaaccgatgaaaaaggtcaacaatttattacaactggtatattggaacaacaagatattgattcaatgtatagtgaagttgttctcaaattgaaggaaagaagaaagaaaccagttgatatgagaaataaaagtagtaaagatggtggtaaaaagaaagcagaagttagtaaagaagattattatagagatgttagatcaagagttgtcttattttgggttattgcaaatgtcgtgttagtcatgacaattacacaaatctataaacctgattcaattacttcaaataaatatttagcatttattctatggtcagtttttggtttcagttgttttagattccttggatcttcatcatacttaattcacttacttattagaaaagttattgtgacaaaacataaatgggaaattgagaaaggagatggtgttaaaaaaatgaataaacttccaaattaacttactcattgatttattcccacaaacaattaaaaaaaaatattgatatcacacagtaaataattttgtatttttgtatagttaacatttaaattaaagcctcatttagagaaaaagtattattaaaaacatattgtagtgtacaagaactgaaactcaagttaaataaaaaagttagagtaaaggaatgtaaaaaggaataatatttaactaattgatgatttcaaactgagaacatgctctttcaatctcattaagtcttcatcatcaataaatggtttgtctgtattaatagtatcaactttttggggacttacaaccggtgaagttgcagaattattaatttgattgttgtaaacattagcaacagatacagaacttgttggtgattttttgaaagctttggaaaagtttgccatattcaaactattttctaataaattagaatctgctgattgatttactaaattaactagactggaatttgaattgattgaaaaaaatgaatcaacattaaactcttcattaattggcagtgttttcttcatagtttcaattgcacttggttcaaatgcacttattattttcattaagttaccttcagatggaattgttggtaataaacttgtatttggtttgaataccggtctagttttgcttgatgaagagccaattatatcagaatctgcctctgaatcaacatctgaatttaaaatttgagaaatcatttcatcgtcggttaaatgttctgtaaagcatctattgcttgcatcaactgaattttctctactaaggaaactttgtgtattggattgattagaaattgatggacgcctgtcagtaactttatatgaacgaattttagaatctgttgataatgatctgcttctattcattattctcagaggttgaattgaattaccactaggtctcatctttacagaggatgatgtagagggttgtgcaaaacctgattcattagtattgctattgtttgaggcaagtgtagctgtgtaactattaacgctactattattacttgcattcaaactttgtgcacttatattaaaattattattggtatatggactagtagctgatgcaaataatgatggtgtgctatcatttgatgatgctgaaaatcttctattggaagatattaatgaagaatctttcgaaacaactgatatattagaagataaatgacttgtattggaagcatttgattttctccttttactaattgttgaatcgtcatttgaacaaaaagattcagatccaaaattaaaagcatttaaatcaaaattcattgagcttgaaccagatgcattagagaatgaggcagcttttttctttctagttgatttctttttatcaaataatgaactatttcttgatttattcatttcaactgaagaaaataattgaagtgtatcattttgaactgtgcttgcatctgtaaaagaatacagaatgttctctcttatgtaattgacaaaggtggtaattaatggatcaacatctttatagttaatcaatatttgatataattgaatcaatttataaatcttttgacaaactaacttatccttaatattttgtaaacttgttattgatattagtgtaactaaatggaaattgaaactatgtaaacataaactttcggcaccttcaattgaaatttcatgagttttgttgcttgatttcggattattaaaagttaaatcatataccaggtcaataaagtcaataaaataggatgaatcaattgaaccattaatattaactaataccttaaaagtataaatagtatgattttaatttattgaaaacaactgaattgtcttcattatataaatcttcaactgattttttccataatgataaatttgcatcaattttctttaaatcttcttcatttttattattaattaattccattatattccaaggaataatttttcaacaatttaactaagcataatgtaatatttatatcattattaaccaaaacaattgtttctaaacttgaaggtttagaagttgtattttcagcacttgtaattgtattatattcgttagttaatggaatattaaaataaatttctgacaactttggttaagattttaaaattccaataaagttttaatctttgaatttcaattatatttttttctttcgtttttgtattaatatcaagtaaatcattttttttattaatattcaaactattcactaaacctttattaatattaataatgtctaacaaaaatctaatatgagaatgaacactatcagtatagtttggtaaattatagttttcaaatttgataagataataatagattaacaatgtaatttcaagtttatctaaatttggagataatagaaaattaatatttctaaacattaaaataatatgttttagattgatgagcttgattgattcatctaattgatttaaagatgttttatccggtagaaaagcagatgaactattgttttcattaatttttggttgacatagggtaaatttcaataccagaatcaacttaatcaaagtatcttggtctttttgattaaattcataatatctttttttcatttccccattatctgaataagttgagttttttaaggtatatttattaacaaaattaagataatcattataaaataattcgaaatctaatattggaattaatttattatagtcattgaaaaatagccaaattaaatgatctagattcttatttgattctaaaccagccattgcatctccatttgttttattatgatttgaatctaggttaaaaagaggaaaaattaatttgtataagatcaaattcaaatatctatttaaattcatatgataattggttaaatgtttataagctagaagattcatatcatcattaatatatgagccattatcatcaatagtgatattattattatttgaagatgaattaacagatgatgaggcaacattttttgaatcagatgctgtgaaaaaggtattattaccagaattataacctttaaaaggatttgattttaatgaagcaaaaatggtttcaaatggtgatttcaaattttgatctaaaaccagtaaaccattactagtttgttaaaatgtttgtattatagaaagcattatctctaatggttagagtttctttaaaggatttaatctgttttattttagaatttgaatttgaatcagatgattttttaatttgatttaggaagagtattattcatttccatatgagagtgtatgtaacatattttcatcaatagtcatattatcattagatttattaattgtggtactgctatttgtaattgaatttttgatggtattattaaaatttgaaacttcattattattattattactattattacttattattattattattattattattattattttcataaaaacttaatttttgttttaatttatttagttcaagtaataattgattcctatttaattcaacatctaataattttttttctaaatttttagtataaccttttggaaatgaatttctagttaatttatctgagacaatacaagggaaaaccatctttttcacaatttgtacattttggattattatcagatttaccactacatttaatttttctagctctacatcgatcacaagcttgagaaattctagttctaccatttgaaggatttttaattatattccaatttaagactgaatctgaggctgttatgattaggatttgaattattattattattgttgttattattatctatatccatctgatcattgttggtattattattattattagtgtagtagtgatattattattagtatcataactaagaacatccaaatcaggagattcttcttttttaattgatgattgttgattagagcacattgtcattaatcaacaaatataatgtgtaatatttaataagaataaggtgatatgaatatgtatgaatatgaatatgaatatgaatatgaatatgagatgaggcttagggatatggaacaatgaaacgtaataaataaaagaaagcaagtaatgagccaaatgacctaaaattcaaacaaaataaataataataaattcaaatatagatttgcccttgaagataaatctgacaaattaatcaattgaaaaagggcaataatgatcatataataataataataataataattataataaaatggaaaatagaaaagtgaaaaaaaaaggggaaaatggggaaaatggggaaaatgaaaaatctggggaaattgtatagtaatacaataaagattattttctattaatgacatattgttaagtaatcattgattaatgagccttctaatatataattcagtcacgcactttttaaaaaaaaatttatttacggagttaattattcggagttaattagttaattaattagttagttagtattacgtaattataatgttattagatctatttctatttctatttctatttctatttttatatcgtacaatttaataataaattaattactaacccataccatatgttccttcatttctccattacaaaattcaatttgttctttagatcctgatttaccaaaatgtttcttaacataatcactatctaattgtaaatgacaaatataatcattcataaccctccaaatatctctctcaaataatcctccaaaatatggtgtatctgaaattaatttaattctatctccattctcctttttaactatattatccttaattaattcaattggtcttaatgcaggattattaatatttaaaaataatggactacgtctctcatttgattgttttaaccatctttgataatttttatatgttaatttatgtttaccctttttactatatttatccatatatgcttcatatgaatatgaatcaactattggatcatattgtaacattgaaactccatgaaattcatctccataccaatatccattactatcaacatttgtattaattgaataatatggattatttaaaacatgtgatgcagctgtaactgtttccttatgtccaaatcctccatctttatctcctgttaataatatataataaacatttggtccatttaaattataatataatgataaaattaatgtacttaaatgaacttcttttattaattataatttcacttgcatcactttgtttaaatggtaatgtattctctaaatcatggaaattaattttatcccttaaatgattttccttaatttcaactgctttcttatttaattcttctgttaatggtaatccaaattcacttgtctttttatttccaaatttaatatcagtaatttcataaaatgaaactaatgtagttcttggtccataatctgtccataaaaataatccattatctttatataattgtttctcaaatatattatgttccattggttttaacataatattttcaggtgttaaatataaaacattttcaaaacttgataataaaattgctaattctcttttaatatcataaaatttaatccaaatttctgaattaatttcatcgttatcaatttgattaccattttcatcaatattatcacttaattttaaaatatcttccattataacacatttcgcattcatttgtggtaaatatttatcacaaatttcactgatcctttaaataatcctcccttcttggtaacataacttcaactggtaacacaccaccagcttttctaaataatctagttgaaactaatgctaaccatgtattatcatttatatgaccaccaactataactgcaccatccctttcaattgaatgaaattctaaatttgaataatgatttggatcagtctctttttgagatttaattgctttcattttttcttttaataatttaacaacatttgaatgtttttccttaacttcatcaaaccattttggttgaattgtaactaatgattctaaatatgataatgaaactaaattatgttcaacagcagttttagtaaattctaattgatattcaggatcatttaaaatttgaggatttggtttatattgacttaattcttttaaataatttttcagtaaatttgaattatgactattaattgtatcacttgatttataagatgatgataatttagatgaaattgaatttgaataaccttcatcataatcaggtaataaattattacgttgttttggtttattagaattttgtaaatcagttattgaagtatatgaatgataaatgaatataattagacaagcagataataaaaggaaagatttcctcttgaacaaacgacttaaaacatttgttgtatttgacattatgactttaaaaaatgtctataaatagtagttatttatatattactgaagaataatagatagatataaccttagtaaatgatataagataattaaataaataatcaaaataaaatgaaataaaatgaaataaaataccaaaaaatatagcaacgataataataacagaaatgaattaaataaatatatcataaatttggaagaaaacttaaatttcccacaaaacgcgtccgtcgcgtctgttttataacatgcgtctatgcgtcggtggttttttctattttttaaatcattcttctattttaacatgattaatacagaacttgttgataaggaattatataatattaaatcattttctataatctctttttatcttgttgacttactaagtattaaacaatgtggaattatctgtttggaggaactaaacaaaagaaagaactgccaaagaaggcaatattagatttacgtgaacatataacaactttaaataaaaagacaaattatattcaatcacaaataactgatcaagaaaatattgctagaaaatatgttacatcaaataaagttttagctaaaaatgctttaaagaaaaagaaaaaattagaagttgatttaatgaaaattgaaaatcaaattgaatcattagaaactcaattaactgcaatcgaatctgctaatttgaatttagaaacaatgaaagcaatgaaacaaggttcaaaggcaattaaacaaatacataaagattttcgatattgataaagttgatgaaacaatggatcaaattagagaacaagttgaagcaagtgaagaaatttctgaagcaattagtaggcctttaggtacagaatttattgatgatgatgaattagatgaagaattagctgcattacaagaggaagaagctgaagctaatttggttgatactcatagaaatgattctaagatacaacaaattcaaagtcaaaaacaaagtcaaaatattataccaaataattcacaaaaattaaatgaaatgccttcagctccaactaaaaaactggatactaatcaatctaataatattgaagatgaagaagatgaagatgaacgtgctctgagagaattacaagctgaaatgggaatgtaactttagtttttattacttcctgcttttttatatttttaatattttatacttatatcctttttcttacgtatactatactattaaattatatatcatatagtttctcaattaatgaataatattttttttaatatatcatcgtcattcagtaatatacattgtttctaaagtttccttatctgtaatgcccattgttctatctttacaaaataataataatttacctaattctttaacaacaacataatctgcatttgctaatttattaccaactaaatctaacaatccaattatattacctaaaccttcaatatcatttaaaacattaacccatctcattaaattaccataaaattctgctcctggtatattattaaaccatgtatgtaataaaattccattacttttatcagttaattgtttcctaatatttcttaaataattatatccattcttattcatttcattattgatatcaaaatttttattattagaattaaattctcccttaatatatagatatgaccaaataactaataacatataaccaattacataacttctaaaaaataaatctgcatcaggtaaataattatattcataatcatatgtagaatcttgtggtgataaaaacatttcaaataatgataaataacaatgaataattgaaacatcacaatgtcgagtttttgtccattcaattactctatttttaattgcatttctttcaaatgttgatgatggtttaacattcattctccatggtgcacctgcaacaatgaaaatatcataatgagaaattgacatataaatatgtgctaaatgatatgcaacacatttacatcttgtatcagatgttgaaaattgtgatgaattacctaatgaatttaaattatcaattgcagttttggatgaacaacatgaatatccaacatcatttctccaaattgcaaatgctgcagttaataaatctctccaatttttagaaattgtattagtaaatttatctaatccgaaaaataattgtaaatccctttgttgaatttgaaataaaattgcacttaatccagccaataatatttttttaccaaacgaatttgttttagtggcattaccattcattatatctcttaaaacaattaaaaattgtcttggacgtggagaatttttaaaatttttagtaaattgattaaaatttgattcccaaacaatatcatcaactggcattgtcatttgaatttgatgtgaataaataaacatttgatgtcccatacaaattgcatcaattgcatccatataaaaacacataaatgttgctctcttcattgattcaatttcaatccatctataccaattttcattttcattattatattcattattttcattctcattatttaatttagttgatgcaccacctaatgttggagatcttcttaataattgaattgttgtaccatgatgtaaatgggatctttcatgtaatcttctatttgaacaatgtttttcataaaattctaacattaataaactttgaattatccaaacttctgcaggtggttggaaaaatggtgatgcaaataataaccatcttaaaggttcagtaattgtatctgataatacctttggttgtaaaattttcttttcatctgggcatgttatattatcaacacacataaataattttgatccaagtacaatcattgataataataataaaattggtgcattacttgcaataaatgttggtctatgtaacattggaaatcttggatgaaaaaaattccaataagttttcaaagctttttcaaattttaactttgtaaaatcaatattactctttaatgctggaattaaattttcaatctctttcatttgatcatcagttaaattgtaaagtgatccttcatcatactgaaaagctgaaatttcagttatttgcttaccctgagaatgttgaaatgatttaagattagaattagttgggtttatagttgatggtatatttgagtttagatttgagtttagatttgagtttgaatttgagtttaaatttgagtttgaattaggtcttgaaattgtattaacatttgaattagtagtgtctgtgaattgtaagatattattattatttaacaaattagtatttgtattagtagtattaatattatttttgttattggtattactagtgttatctttattatctttatcatttgaactaaaataacctgcacttgatgaagatggtgaaaaatcatcttgaacaataaagagattatgagtattattattcaagtggaaatcacttaattctgataagaaattattttttgttgagtttttagataagatatcattatttatattgttagcattggtattgtaattataactcattgaattttcaaaattatcatttgtagttgagttactcatttgatttatatttttgtttatatttgtgtttgtattcgtattcgtattagtgttcgtgttcgtgttcgtgttcgtaatttcattatttttaggtataaaacttaggattattcattgattcatgtaaatattcagcatttggaggtggaactatattatttgataatagaccaggatcagtaaataaccaactgaaaagatttggagctgtagaagatgaagttgttgatgatggatcgatagaatccatatccttattcaatggaatctggtttgtattgttgatattattattactattttcaaggtaaaagatcattattatgttgattaactaaatttttaacatttgaatttaatatataatcattttttttcgtgaaaggatttaaattatcagtatttagaacaactgaagttaaaaagtcatttgattttccattattttcattaaatttttgaattttattttcatgtcttttaatatgtctaactaaaagatcatgtctaacaaaagttttctcacaatttggatgattacatttaaagattttttttggattatgatttaatttatgtcttgataaatgttcacttctttgaaatgatttattacaaccttcaaattgacaaaaaaaggggggaccctttgaagttttctttctccctctttttttcagttgtgagttgattaaattagtatttgaatcagaggatatattatcagtgttagtagtatcattattgttattaccagtattgttgttattgttgttgttattgttattattgttattattgttattattattattattatctatattttcatttatcaacattgataattaacttctccatcaagtattgtaatataagatgatatgatgataaaaaatattaataataatttttcagaaaaaaaagaaacgactagtgaataactataatatatatccactttattaaatgtttgaaatattaataagttttcaattgtcaaaaggcatgtctaaatgaaaaccctggaaataaaataaagtttatttactataataataataataataataataattattaataatcctaataagttcaaattgttacattgaaaaaattcaacgttcatcccactaatgcgctcccgatttggcagacttttcgtggggtgagattgaacctaagttgaaattttgaaatttcaatttataataatcttagagattatgtgttattatcattatcttacatacaggatactacatataaatataatgaatacggaggatataattgagaaatataagagagagggacattttgataataagagaagggaattatttgaaaaatttacaagtaacaataaaaatagtgaaaaattaagtaaattactcgaaaaggtaattaaaattaagataagtaaagatcctgatattattttcaaaaacaacgggaaaatatcggcaataattcaaactgaacttgttaaaagacatatcagtaagaaaaatagtaatagtaatattaataataataataataataataaaattattaatagtagtataaaggaaaacaataataaaagtgaagaatccgatttattagaattatttgatgaaattaattcaatattagatgaatatgcaaatagtgtagaaattgttaatacagatgaattaaaggagttaaaataaatcaaagtaaagtaagtattaagacataaaccggaacttattcggtgagaatgaatgaatatagagtaggataaggtaaatccgcttagtatattgctcaatgatataactggataataaaatattacattggattgggttagaagactagaatgtcataatatatcagaatattatattcggttgaaagaaaagtatttagtcgatttaagtagtcaatcatcgatttaatgattaattagtgggataaataattaatattatcattacgtaatatcacagtcacgtgatgtggttacgtaagtatagtcacgtgattataatttatgtttaggtaatcaccaccaaggttataaatattatatcaacatgacatttaaacaataacatgtcaaaatagctttttcaaataagtctattttaatttaactctaatttatcttcttttatctactgtaaaggttatcaaattatcattatatttattttaactacatgtgtcccttcatttgatgactaataaaccattcatccgtgtattcattatcttgcttaggcctttttttccaatttttaagtctatttcatttcatctagtataataatcttttattatcgctttctatgagttaagatgattgaaattaaaaatgaaattaaaaatgaaattaaaaatgaaaatgaaaatataaatataaatcaagaaaatattatcaataataatactaatcagaatgatataaataatgatataaatttaaacattaatccaaatgattgttatatagattcaaaaacatttaatcaatttttacaatgttgttttgatccatctcatatatctgatagtaataataataataatgataatgataatattcgatatacccaggatcatatccattctcataatataccatttccacattctcattctcattcgcattcgcattcgcattctcattctcatacacacagtcatagtcataatcattcacataatcatcaatcaccttcacttgaatcttcaagtattacaagtcatgaaagtccactcattgatcaaaattttatagataattgtataccaattaatttaaatccttgttgtgatgattcatgttttcaaaccaatgataataataataataataataataataataataataataataataataataatataattccaaatgaattatctgaaatggtattacttaattctttcttcaatgcttgttgtgatgatattgataataatgataataatcaaattcatcctcatattcatcctcatattcattataatccaactgaaaatcccaacaataataataaaaatgatatgaatcttgatattgatcatcatcatcatttattacatttacatcatcatgatcctgataactcttctaaaaagcatactcatgatattattttccatcatcataattctaataattgtaatcatgataataattcaaatcatcatcatcatttacattttgaagatcaattaaatggtcaaaagataaaacatgattttatattacctgattgtgatttaccaattaataccacacccaataagaaagtgaaatctaaaaaagatactaagaatattaataataataaggaaaaagataagaataaaattttgaaacctgaagattgttctgatttcctaacatcttctgtatgtaatttggattcaatattcaataataatattaatacaaataccattaataataataataataatgataatgataataatactggtgatgggaaatatattgaacaaaggaatggacattatacaaaacataactattgtaatcataatttaaaattaccatcacaaaattgtcaaaataatccaaattgtaaaccaccattttgttcaaattctatacctcatcattatttacatcatcatattgaaaatgatattcataatcaacatttccattcaaacattcaaggtcacaataaaatcaagagtgaaaatgaaaataatgaaaatgataataaaaatgatgataataatgataacaatacagaaactactattaagaatgagtttctatcagataatgatgaatttcttacatgtaaatgggactcatgtaatgaagaaattgaaactgaattaattaataaacatttatttgaaaatcatttacaaaatttacatttatcaccagataattttaaagatgaatttaatgataatattaaattatcaaatttaaaactgcattgtgaatgggatgattgtgaatttttcactgataatgttgatttatttttaaaacatgttcctgaacatactgaattacttaaaaatattaaaactgagacatcagaagaagataatggagaatgtacatgataatcataatcataatcataataataataataaacatatttgtaaatggattattaatggtgaaaaatgtgatgaaagtttttgagaatactgaattattaacaaatcatataattgataaacatatatcatcaggtaaatctgaatatatttgtaattgggaaggatgtaatagagacaataaaccatttacacaaaagcaaaaaattattagacatttaaatactcatacaaagcataaaccatttgaatgtaatatttgtggtaaaaaattttcacttgatttaatgttaaagcaacatatgagaattcatactggtgaaaaaccatataaatgtgatatttgtggtaaaacatttaaaacatcatcaagtttaacaattcatttaagaattcatagtggtgataaaccaatgatttgtaaaatttgtggtaaaagatttaatgaatcatcaaatttaaataaacatatgaaaattcattttagggaatataaatgtgattattgtatgaaaagttttgattgtgaaatcaaatttaagagacataaattaagttgtaaaaaaagggttttataaattatatattgaaagtagggataaataatcataataataaaattaaaagtacattgcatttctaatatctatattatataagaatttaatcaaagaaagaatcaacagaactacctaaataaagttttaattgacttttagtacttggtaaaactttacatttaaccattggtacacctgctctatcataagcttgaaatctatgacaaccaccgaaagcaaaatattttttaacaccattttgagagacacataatacatcaattggaggtaattcacctgaaacgatatcttgaatttgacaagttttagaaggtgttggtactccttcaagtgttttaaccattgtatctattttttcgttatctaaaactggcataattggtcgtattatatcggataatgggacaaattctatattaccgtaatttctagtttgtaatgacatgataagttttttgatgaatattgttttttgtttatttaattgagtataaattataattatagtataaataatgtaataaataattgagaagaagttctctctttatatagtaaatagtgaaaagtttaacaatttgtcatctccggagaaacttttcattacctgggcttatcatttataattttcatgtcaaagtctggatttacttacgtaatgagtttttttcttgtttttgctttgtttttgtttttgtttacggttttgaaattgaaattgcatgcatctgggatcaaggtttctttgttggaagttgtgtattggtgtaacggtatttactggtaagatacgactttaacactatcacacacaatatggctgatgatggagaatctgattttacatctttacccctggatgaacttataattcataaatcttggaaggctcgtcaattaggttataatcaattaaaacaactagcagattcaaatataaatgataattcaataattaatttacttaatgatactgaaattattaaaaaaatagcatcagattcaaatttagcttcacaggaaactggtatatcgactttatttacaatattgaaaaatatttcaattccaaataatactaaatattgtacaaatttaagaaattctttaataccaatacttgttgaaaaaggtcttacatcaaataaggctaataccaaaatatcttcaactgaattaatcctattatttgttgaagttgatagtccatctgatattttagaattaataataccttcattaactgctaaatctcctaagccaataattgcagcaattaaagtaattaatcaaatttttaaagaatttggttgtgttgcgattaatccaaaattaattattgataatatacctaaaatgtttgctcactcagataaaaatgttagaagtgaagcgacaaatttatgtgttactttaagatcttatattggtgaatcattagataatgtgattttctcaaaattaaaacctattcaacaaaaagatttaacagctttatttaataaaattcaaccaggtactaaacctaatagacttttactggttgaacaaattaaaattaaggaaagagagtcacaaaataatcaagttaataatagtgtcccaataaatgatattgatattgaaatggttgatattaaagttgatgattcacaacccgtatttgatccatatgaatttgaagatcctattgatgtattgaataaattaccatcaaatttaaatgaagagattaagtgatcctgtttggaaagaaagagttgaaatattaaaagagatatcaccattatttaaagtaaataaaattcaaaatgatgattattcatatttcatatcattaatggttggatgtttaaaagatgttaatttacaagtagttacattatcagctgatatattaactgatttagcaaaaggtttaaaaacaaatttttctaaatacatatcaacaataataactcctttacttgaaagaacgaaggaaaagaaaaaatcagttttagattcattaattaatattttaacattatgtttccaattaggttcatttcatgaacttgttgaaccaattgttgaacatatgaaacatatatcacctttagttaaagttgaaacaatgcaatatcttgtacgatgtttaaaagaattgacaaaaacacctaattcaattgatgttgaacaaataatgacaacagctctgaaacttgtattagattctcaattacctgttagaaatagtgcatctgaagtaattggtacattaatgaaagttattggaaatgaagcatcaaagaaatatattgaaaaaattgataaacgtcatataaagaaaattgaacaaatttgtaataatgcagttgttaaaattaaaaatcaatcattaaatgataataataatgttaataatatagagagagaaactaaaaaaccaattagaaacaatgaaatttctagaaatacaacacctttacttccacaaaatatgaataataattttaacatcactactaaacaatctataccttcaaaacgtttagcaacttcaccagttaaggataatgtaccaaatagtaaaaatccactcacatcaaaatcattaaaggcatcaaatattaataactataatttatcaacacaacaagtacaagaatttgaattattaaaaattgagaggaataattggaatttaatgaaaattgaaatggagaatgaaattaatgaattaagacgtaataatgaagaattaatgaaaactaataatttattaaataataaactggatgattatcataataaatttactacaatgaatttaactttaaaatcaaaggaaacacaaatattaagattagatagtgatattgagaatgcaagatcaaagaatattcaattacaacaaaaagttcgaatgttagagaatcaacttgaaacgaataagttaattaatggtaaagatattgatccaatgccaataagtaataataataataataatagtaacatagcgaataagaatatggatattaatactaatgttgatataagtatggatgaatcaacagatattaatagaaggatatcaattttaagtattgattcaacaactggagaaccacgagaaagaggaagtaaaatatcagaaacacaacctaaattacttaatatcaccaacagttctatttataattttgatgataatgatgaaggatggatcaaggctacagctataaccaatgatcttaaggccaagattcaaagaatgaaggccagatcaagagctaatgattcattaactgattaagacgcgtcaatataaatactataaatttattacgtaatcagacggagttttcgcagtttttcaactgggtgaaattttaaaatttcttatagagagtgaatcatttaatttatagaagagtcattttagaatatgtataggattttacttttgtagaatatttaattaattgacaaaaatatcacattcattatgtctagtaagattaaaatattggttcctgttaaaagagttatagatgctgctcttaaaccaagaataaataaaactaaaactggtgttgaatctcaaggtgttaaatttagtattaatccatttgatgatattgcagttgaggaagcatgtaaaattagaaaaaataataaaggtttagttgaatctattcatgcagttactattggatcaactaaggcaaaggaagttttaagaactgcacttgcaagaggtgcagatacttcaacattaattgaaattaatgaagataaacaaattgaaccattagcagtttctaaaatattgaaaaaaattgttgaaaaggaaggttcaaattttgttattttaggtaaacaagcaattgatgatgattcaaatcaagttggtcaaatgttagcaggtttattaggttggtcacaagcgacaaatgctgcaaaaatcataattgaaaatgataatttaattaaagttgaaagagaaattgatggtggtgtagaagttattgaagctccattaccaattgttattacaactgatttaagattaaatgaaccaaaatttattaaattaccaatgatgatgaaagcaaagaagaaacctttaggtgttttaaaaccagaagatttaaatgttgaaattaatgatagattagaaacaatttcattagatgtaccaccaactagaaaagctggtgtaatggttaataatgttgatgaattaatttcaaaattaaaggaacttgaaaaacaagcttaattgttgttacattaatatattatatcttttactttatgcatgtataaatcttgattatttatttatttactctactaaaagaaactttttatgatcatcatctagtagtaatagaaaggaattcatcatataaatcatattaatggtcaaaacgcgatgtatatctcctactaataggtttgtaagactttatggaacttgtattaaatcaaccattacttcaacatttcctaataaaatagaatttgatctgatgtgaaaagtttacttcacccttacactgtgtttctttactaacattttcctttttagcaaatatatatatatatatatcaaatgaacaaatctacagttgttgaaagtgccattggactaatatcatccttacttgatgatcaactaaaagggggaacccaaaaaccattagtcgttggaattgaaggtcctcaaggttcaggtaaaactacagctgcttcaaaaactaaagaatcattagagaatacatttcccaatgctaatattatacaattttcaatggatgatttttatctgacatatgaacaacaattagaagtttctaaacaaaataatgataatccattgttacagggtagaggattacctggtacacatgatttattattattaagtaatattttcaatcaattgttagcaaatgatgaaagtaaattaccaataagtattccatgctatgataaatcagcatacaatggtaaaggtgatagatcaaatattgataattggacaattgttgataaaaaagttgatttgataatttttgaaggttggtttaatggttattgttcaattaataataataaagaagtattagtaaaatggaatctaattaaacaaatttatttaggtagatttgataatgtgaaagatgatcatattattcaaataaatgataatttaaagcaatatgaaattatttggcaacttttcgatttattcgtatgtattaaaacagatgatattaataatgtttataaatggagaattcaacaagagcatgaattgattaaattaaaaggaatgggtatgaatgataatgaagttgaaaaatttgttgatagatatatgccggtttattatttatattatgatacattaactaatattcaatcaaatattaaaacacttgaattaaacattgatattgcaagaaatttgattaatgtaaattatttaacattatataagtcttctagtgattgatctttcaacgtatgtttgatcttgtgataattctggtactgaatgctttttggatttagttctagtaagccgttttcttctgggtgttttcttgcgtttttttactggtgttgacttagatctttgaactttagttcctgtatcaacttctatgctattatttgatgaatcttgtgttggtgttggtaaatgacctgttggtaaaaaacttgtctgtgaactactttgggatagatgacttgttgttgataaacgactttgtgttggtaataacataaactgattctggttcctactttcttctcgttcatcatttgatttgtttactctattcccattctctttcctttgattacttaccaatgattcaataacatttgacagttcctcaattcgtttttccaaatattcattttttttcttctgttgctttacatgaatctggagcttttcatgtatttcattagttgtatttatttcaacttcatatatggtatcctgtaatgatttgatcttttcatttgcattggataatttactataaattgtttccaattcatcatttatttgcatatttatcatattttctacatgtgcatctctattagaggtacttattttaagatcaaaaatatatctctttgtatcatttaaagatttagctagattagttgacattgtcgttaatctatcaattaattctctactggaagatttaaaatctatactttcaagttctaacttacttgcccaaacaattaattcctgtttgtcataagcatcgacatcaacagctgttacatctatctcactggatagatcggtagatggacaactcattgtgaaatgaatgaagagcaaagcaaacagtgtgcatgtattacactaaagatctgagccttctaaactatttacgtaatacttttgtaaagtgaaattatttttgatatattccacaaggtcttatttacttgcatttcttcatcatctcaaatatattattatagcatcgagtgagctttgattgtccaatgtctgggctcaaagagtatcttggagatagggttaaagtattgacatcagatggacgtcttttcattggattattagaaggttatgatcaaaatatgaatattgtacttacaaaatctgaagaattaattttttcaatggataaaccaactataaggaagaatacttcaggtattttgattagaggtgatgatattgttagtgttggaatgattgatgaagatttagagaaatctgttgaatataataaaatttttgcaactaatttgaaaactacaaaacgttcattcaagattaaataagaacttaaatctattctaaaagctatatataaataaattttttgtacattagacatttgttaaactatattttaattttctttaacagttggaatacccatttgtttcattttaactgctaattcaagtaaataatcgattgcttcattataaattttagccttccaaacagtttcaccccaaacatagataccatgtcttctaactaaaacagcagttgcagaaggatattcttcaattgcctttcttaaagaagtttctaattcttcctctctttcagtattttcaataattggaataattaatttatcagaataccacatattaccaggttcagtaattttaggtaatgctttaatttgttcaattgaagaaatttcgaaaactttatcaaataataaagtacacataacagcattttgtgaatgagtatgaatacaagcacctgcatttctcattgtataagctgccataaataatggagtacaagctgaaggttttaaatttaaaggttttctaatatattcctttgaattcattgacataacaaatatatttgttggtaacatacgttccttttgaactccacttggtgctaaataaatattatcatcctttttaactgatataccaccacctgtacctgtaacccaaccattattgtaaaataatttacaaaattcacagattaaatttgcaggatgttcaggatgtgaagaaatgactaatgaatcattattatcatcagaatctgattctttaaatttcggtccacaacatgacgatgatgattcagttgtttgtttagaacaacaacatgaatcttcctttacggatatttcattaactggttcggactttttagaacgacatttacaacccatttttgaagattctttttttgaaactggaatttctttgacagttttcttttctgtaataggtttagctgttggtgtagatgatgctgatgatgatgatgagaagaatgatttcaagctgggcattatttaatgataatgaagtaaaaaagttagtgtggcatttatgaaattattggacacattgcatgtgaagaaataatgaaaaatcgagaatatggtcaaacacgtttttcaatatgaacttttatggagtagtaataattaacttttttatatcagtttgatacttatattattcggtgttttgaagatttattgactaatttttagcaaacataataaaaattttatttcaaaactgtgttgaagttagaaattaaaaaattgtaaaatctttaaactttgataaaattttataaatcaagaaaaaacattatttttttgtaattttttataaattcactacttcaataaacaaaatatcatttaatattactcggtatacttttaaatcattgaaaaatccattattaacgggtgttgggcgggggtttatttcactaaacaacattgtgaaaaagcatcaaaacgtacaaaacgtaaaaggttgtatagtgtagtggttatcactctcggttttgatccgggcaaccccagttcgaatccgggtacgacctttcaaaatagcattttttttttaatatggacagatagatcagatcaaatacttccccttcctataaccaatttttttgaagggcgattttattttcattaatggttttgttttaggaatgtgttgaaatttttcattttgcattttgcattttatatatctttttttgattcttttgattgttttatttgaacaaacctacatctttataaatagatatattaagtagtagatcttactcttcttctctgttacacaacctttcactttttgctttccacacatatcttattatatctaatcatcaatttttcttaacaaaaaaggacaaggctttaaatttttcagtgtatcatctatatatcgataaaatataaaagtatttaactattatttttatatcctatattataccataccatatatattataatggaagcacaaattgaacaagcagtggaaattgcaaacaatccttcaagtgaatcatctcttaaagatcaagctttatcttttattacacaaattaaaacttcaaatgatggatggcaaccttgtttaaaattattacaatcagattcaactacaattaatggtaaattcttttctttacaagttattaatgaaagattaccttatttatcagataatgaaaaaattcaaattaaagatattgtatttaattatttaaataatttaatttcatcaaataaaattgaacaatttttttaagaaatgctttatctaaaactttaggtttaatattcgttcattgtactttaacttgttattcaactttattaaaagatttattatctttatcatataattcatcaaatgattctttcaatgaaattgcaactgattattatattagaactgttttagttattcatcaagaaattggtgatcaattaattactagaaataatgaatctcaagaacataataatttacttaaagattcaattagagcaaatgatatgattgatttaacaactatttggaaaaaaattttaattaattttacaaatcctaataatatatcaaataaacaattatctgatgaaattattaataatacagttgtatgcattggttcttatgtttcatggatcgaaattaatttaatattagatgaccaatatatgtcattctttatcaatttttaagttcaaatgaaaatggtacttcaaagaggaaagttgtaactgcaaatacttttaatgatattttacataagaaaatgtcaccaactaaaaaattagaattaattaattttttaaatttgggttcaattttaattcaaatgaatatcaattcaaatgttttaggttttgatgtttcaatgtcattagcaaaattagttaatcaaattggtgatgaattaattattgtacttgaaaattcttcaaaggaagaattattaaataatgaatttaaaaatttagcttgttcaaaaattttagaaattttccctttaatatttgaatttttatcaaatgaatttgatgatatatcaattgaagttttctccttcatttcaaatttcttattattattaaagaaaaatataacttcagaaattgatttatccataattaataatgatgaaatcttgaaaaatttatctaaaaatattatactgaaattaaaattcgatgaagaagatgatggtgatgatgatgaaacaattgaacaattcaatgatattagaaataaattaagtgttttcttagattcaattgttttattaaatgaatcattagcattagaagttttaattaattgtattaatgaatttttattctcaaatatttcatcatcaaatgattcatcatcatcaatatcagattggagaacaatcgaattaggactttatgttttaacatattatagtgatatgttaagaaataatgttatgaatttaccaaagacaatgattaataattcaagaccttattttgttttcaatgaaatgttatgtaaaattattaataattcaaatcaaattttaatcagtcatccattaattcaattattattctttgaattactttcaaaacattatacattttttaataataataatattcaagtagaaaatattaataaggaagatattttaatgaaagttttaaatattttcatttcaaattttggtgttttcagtgataatgaaaaagttaaatatagatcatggtacttattatatagatttatcaaaatgactaaaccgaaaatcaacgattatattattcaagaattaattaaatcattattaccattattaacattaaattttgatattacatcaaataaaaatataagtaaatcaacaaattctaattcaattgaatcattatatgatttagatttaacattaattgaagaaaatggttcatttgagagtcaattatatttatttgagagtgttggtatattaattacattaatttcagatgataataataaaatcaatatatttgaaaatgttttacaaccattattttcaaatttagaaaatggtattacattagttaacaattctcaattaacaattaaagttttaattcaagttcatcattcactaatttcaatgggtaatattctcaaaggatttgaaaatttaagaagtgaaacttttaataataataatttccttaatttattaaatcaaatatcacaagttattttcattacattagaaagtttaattaattttaatataattagagaatgtattcaattttgtgttgttagattatacattttattaaatagtaacaacaacaataacaatagtattaaagaactattagaaaatattttatccaaatttatttcatgtattatgattaattttgataaattgaaaagtttagaagttgttaattttatcaattttatttcacaaattttacatcaatcaaccaataatccaaattcttattcattattatcatcattattatcaccattattgaataaaattttcattaaaattgaaaatgataaggcaactgtgagtgatgactttagtaaacgtgaagtattagacttagagaaagcagtattatcaattataattgcagtttcaaatgatcatttaaattcaatttggttagttaataatgaaaataaggaaatgttaattaatataattaaattaacattaaatattgcatttgaatatcaatcaaatgatttaagtattgtgaaattatcaatcataattttaaatatgttatgtcaaggaattggtagtggtattgtacttgatcaattagattcatttaaaaacgataataataaatttgaacaagttaatgaaattttaattaataattgtattttattaagtattgaattatcaattaaaataccaggatcaaataaaaatttactaaaagatgcacaatttcgaaacaatgtcgttttagagacttgtagattattaaaaggtattgcacatattggatatgaatatcctgatgctaatacattacaaaagaaaaaaacagaaaacaacagtacaaatactgcatcaacagctgtgctaaatacaaagaatggattaccacaaggatttaatgaaactacatgtaatatgattaatgaagttttagtttcaaatgttggattccctgcacaactttcaacagaacttgttcaaacacttgtatcatcaacagatagacagtttatgaaacatttgttaacattaatagagaacttccaatagtgaataatatataatataaaaagaacctgtatagattaaaaataaaataaaagttaataaaataaaataaaagtaacattaaagtaacattaaagtaaaatagaatgcaacaaatgcccgcatcaggtaattaaaaaatttaaaacatgcaaattggttatctctgttttttatatttgcaacttttgagattatattttattgtggttgttttaactcctttgcttttgtttgattctattctcctttcctgttgcatctcatcctatacgtaaaggttagacaggttaagatcaacatcatattcaaataacaaaagctagaacgtatgtctgatttaacaattgatacctatccaatagaattagatacaacaccaaaaatgagccacgaaaatggaaatgggaatggaaataatagaaataaaaacaatgataataatgatgttagtacggctgtccctaaaacatggaatgataataatgtcactaatgtaactaatggaacaataccaatgataaatatatctgaagagataataattgatgaagaaaatgaagaatcaaccattgaagatagaataatagttgaattatcaacaccaaataaattacagagtgtatcaacatcattaagttcaagtacatcatcagtgtatgagaaaccaccaacaagtttacaaaaggaaattatttgtgaggaaacatttttagaagataatgaaattaatgatgatttatctgatgaatttgaactttctaataccccaagaaaaattgaacaacgaaggagttcaaaacgtgcaatgagttcgtctaatgaaaatgatgaaatgtttaaatttaagtcaagaattaaattaaattcaccaaataaattagaatttaacccctttattaatcaatttgataattttattaatcataaatcattaccatcattaatttattgtaaattattaagtattgatgaagttataaattacttaaatcaaacatataataggaaattacctgaagttgaaaaagttttcccctggttacatggtattcataaacataattatggacaaataagttttttaagtaatacattatatccaactaatgataaacctaaaattataacatttgaaaaaccaactagctctaacaatataaacccgttagatgatctggatgaaaaaattaatacagaaggacaagaaggaacaattgaagaagaggatgatgatgttaataaattaatgcaaacaccagatgtaaggtttcttatacctattcgatcatgtaattctaatggagaggcgtcatcagaatttaccaatataattactgaatcatgtggattcatacgtggtagtattattcctgaagatatattaattccatattcaagtataattaatttagaaggatatttacaaaaaaatttaccaagaattgtatttgaacaatatcatattgaaacaatcataacagattgtattataacacatttgatacctgttttcagagatgttgatccagttgttggaattaatttaagaaattttcatattcaagtaagtaaaataagtcatgtctcagatttcatagtttattgttttaataaagaggatcataaatttaatatgaatattgaagataaagattttttcataaataataaatgtaaatgtgttagtttatcaagattattacatattgcacaattagcatatcaatatcaacataaggaaattctcaaaccatataccaataagaaattacttaatgataaaaaatataatacattcatattaagagagaatgatattaatagattagatgaatctaatgtaatttcaatacctatattaagtgaaaattcatcaaataagatacaaaatgaattatgttccaattatgatattaatgttttcaataattgggattcaaattacctatatagggaaagactcgagataagtaaaatgtcaacagctactccaattaaaggatctatttggattggaaatataactgattatgaatgtttacaaattcaattaaataatcaaaatattagagatataatcagtgatgaagaagttggaaacatgttaaataatcaacaaaaatgtccaatttattgtaatgaagataacacaattgttagattacggaaaaatgattttcaaaaatgtaatggagattccaataaactcgatgaattattaataactaaaccaaagaaaatttggagaatgtatattaaatgtattgaagaatcaagaattccaacattaaaacaattaagaattatttatgaaaattatttggaatgtgattatatcaatattgaattcccaccatcaggatcattaacaatggctgatatgtcagatgatgaaattttatcaattattaatatttgtaaattttgttattatatttgtgatgataatttcccatgtttaatttattgttctgatggatatactgaatcatcacttttaatattatgttatttaatgtattcagagaaaatttcattagatgaaagtattttaaaattacataaagattatggtagaccatttttcatttttaaaacagattatttattattacaaaaattagaaattataatgaataaattttcaccattaaataaaaatgatgatgatgaaatagagactagagaatcatttaaatttgaagaggataagagaatgttacgttcattattattattaatgccaaaaggtaaaaatataggtacagttggaggtaataatcaatcatcatttataacaccaacgggacatcatattgttcaattacgtggtagtaatagtaataaaaatgcggttaggtaatacatttggtaaatcatcaatgtttaatggtaattccgttaaagttaataataacaaaatagtggagacatcaaagagtatatttgaagaagtttcaggttcattaccatcaagaattttaaaacatttatatttaggatcattaaatcatgccgagagtttaattatgttaaataaattaggtattgaatatattgttagtgttggagagaatgttaattggattgaaaaatttaaatataataaaaatattaaggataatggtaatattgaatatgaatttaatgataagaatttaaatattaaaaaattattaattattaatgaattaagtgatgatggtatgtcaacaattacattatcattgaaaaattcattagaattaattaatgaatgttatgaaaaagatagtaaaatattagttcattgtcaagttggagttagtagaagtgcaactgtttgtatttgtgaagttatgaaaaggttaaatttaagtatttgcagagcatatttatttgttagagttagaaggttaaatgttataattcaaccaaatttaaaattaatgtatgaattaaataaatgggaagaaaattttaataaaagggaagttgaatggtatgttctttgtagggaaatttataatttaaatagaagttatataaaatgagtttataattatataattttgtccattaatcatgtttatttgaactattacaaacaattaaataaataaagaaagttgcaccaacaagtgaaattgaaccacaagtaattgatattaaagtattaataattgttgtataagtaatataaagaactgttgaatctgatttaataattttattaacaaagaataaattgtataatgaagtataagttaaggaaacaccaaattgaaaatgaagaatttaagaatatccaccattgccaatttttaattaggttgttctttaatttaagataagttgcaattataccaatttcaaacataattaatgataaaagtattgaagaaataatgataaaacctgcaattatatttgaattatttaatgataataaagttgaataaatgaattttgattcaatgaaaataattgatgatgggaaaataccaattattataaaactaaatgggaaataaaggtaaattggctttttattaggtaagtatatatgatgatgatgatgatgatatgaaatttcctttgatttccttttagataagatattgtaaaaaatatttaattttgaagaaactaaaccaccaataattgcaattggtatttgaacaatacaataaattgagaaagtgtaaataaaagttgagaattctaatgaatttggtgaatttttcttgaaaatagtatgattaacaattaagatgatgattaaagggattgaaattggtaatgaagaagataatgaagacattaaacaagttaatttaaatgaaacattaggtgaattattaaataatttgtataattgaattgatgtaaaacctgcaaagaaacctgaaatgatgattaaaaagattataggataaaggattttcaaatcatttgaagaaattgagaggatatttttaaaagggaagattgcaattaatgtgaataggaataatgagaagaataattgaatacctgcaccagtgaggattgataataggggagagatgaaaggtttattgaaagaagcggaatgctaggtcatgaagggaagttggagtgttttgtgatgatgatgaagatgagcttctaaaagtgataatgataataaatgccaagacaattgaaaggaagaagaatataacgaatgaattaattagagaaacccaatgaattgttgaagaaggatttttatttaaaattttaccattttcatcaatttgagaggaatctatatataatttccaacgattttggtaattaatttgattatcttctctccaataaattgaataagtataaggaattaatttatttgaatcatttggatctaattttaaattttgataatttttagaagcaccaggacaacttgcatcactaactgattttggataaatttcgaaaccaacgattgaataattattatcgaattcatgatgataacgtataaccatcattaaatgattattaataaaagtttcaccatttttattaataaaacctagagggaaacctttaacataatattttttaatattatcatcaaggacactgtctttaatgaaagtggttgcaccgggtaaatcatcaataaaccaattagctatataattatcattaattaaagagattgatcttttaatattacgttgattcataattctatcacataaacgtaaacaaggttgatcaattttaaaatttagggaataatctgattgataaagggtattaccagttaagatttgaggtaaagacatatgaatgggggagacatttgaagaagcaggacaaacgaatggtaaatgatagtaggatagaggatgatttttaggagaagttgcagtattaacaattaattctactttatcacctttttgatataattgagccagtgaggttgtaattagtaggtagaaatatattaacaatcgcatgatagtatgagagtatgataataagataaaagagataaaagacgtaagataaataaaagacataaaataaaataaaataaaataaaataaaataaaataaaataaaataaaataaacagtggtatggtgaataaaataagaaatttgaaaattaaataataataataataatccttaagtatacagtgcgtgtttttcttttaagtaagagagtataatatatactagacgagatggaatacacaccaagatatgtaccaccactgaattttgcatgtgttgaaaaggagttatataggagtggacatccacaggatagaaatttaagttttattaaatcattgaagttgaatagagttatatttgtaatagatagtagtaaagatagtaaagagaagaaatacacagatgagacaattaaatggagggaatggtgtttaaaggaggggattaaattttatatagtaagtataaatgaaggagtgagattaataagagaagaaggggaagagagagcaggacctacactaatacattcattaagaggagttgaaatagttggtaaagtaatagcccagttaagagaggcagaacagtggacaatatcagcaatagcagctgaatacagttcattcggtggtattgaaagtgatgtattgtaattaatgccttttattatattatactatatccaatagaaagagtgtaattattcttatctgtcattacgtaatggtgattatgtaatcatttattatattaatattaaaatttttcttctatttatttactaaactttatttatttaattttattgacagattattatgtcaatcatcttatagaccctttaattgtagattatatactacactctttctttggacaatgactgttgttcacgtttgggctaatacttataactatgcaacagtattagcaaccgttattggaacggctcttgttcttatcatgtgtttcggtttagcttatctttattcaggtttagctaggaggaaatctgctctacatatgattttttcagttttctttattttactaatttcaatcttccattggtatttttgggggtattcacttgcattttcatctacggcaactaataaatttattggtaatttacataattttgcttatcaaaatttagataatccttatactgtcattaatgataaaattataatacctgaaatggcttatgctaattttcaaggtatgtttgcttcaataactgcttgtatctatattggggctatatgtgaaagaggtagaattttacccttcatccctttcactttcctttggttaacccttgtttattgtcctgttacttgttggatttggaattcaaatggttgggcttataaatggggggtcttagattatgcaggtggtggtcctgttgaaattttatctggtttttcaggtttcgttatttcttatttcttaggtcaaagaagagaacatttaatgattaattttagacctcataatgtttcaatggttacaattggtacaatgttattatggtttggttggttaggttttaatggtttaacttgtctttccccctctttaaaatcagtttatgcaattatgaatactaatttatgtgccgcatttgctgggtttacttgggttttattggatttttatagaactaatcattggtcaactgttggtttatgttctggtataatttcaggtttagttgctgcaactcccaacattcagggtgtatacctttatggtcttcaataattttaggtattcgtatcaggatttactttgtaattttgctacaattattaaaatttggtttaaagttgatgattcattagatgtattggcagaacatggtattgcaggtgtaattggactttttttcaatggtttatttgcaactgattatattttaggttatgatggttatacaattcatccaggtggttggatgaatcaaaattggaaacaattatataaacaaattgcttatattggtgcagttattggttattcaatggttgtaactgcattactttgtttcattattaataaattaccttattgtaatttaagagttgatgaaattggtgaagaattaggtatggatgaagatcaaattggtgaattcgcttatgattacgttgaagttcgtagaaatttctttgatgttcatggtttagataatattcatgctaatgctaatcatcctactactcctgtttctgatatccattcaacaattcaaaataaacaagagtgagtaattatctataagtctattatatatacttttatgttatcttgtttatattattttaatatgctgtttaattgtaacagttataccccaattattaatgattatgataatgataattatattgataaatatgaaaagaaagttatattcaacactgattcactttcaaaactacgtcatttaatgaaattaaataatataacaacttatataatcccttcagaggattctcatcaaagtgaatataccgcaattcaacatcaaagaagacaatttataactaattttacaggttcttcaggaattgccattataaccctttattcagctgctttatcaactgattcaagatattttattcaagctgaaaaacaattaaataaaaatgattttatacttttaaaacaaggtattgatgaaaattggattgattggatgattaatgaaacaattaattgtattaatcatcataataatgattcacctcctttcattgcagttgatccaactttaattacctatgatttatcaattaaattaaaatcaatttgctacaaaaataatttaacctttgttacaagatttagattataatttaattgataaaattaaaccgaaaattaatataccaattaatcaattatttatctatgatttaaaatattctggtgtccccataattgataaattatcaataattagaaatgaaatgctcaaggacaaaattcattcatatatttcaggttcacttgattcaattgcttggttattaaatttacgtggtaatgatatagaatataatcctgttttcttctcttatattattataactcataatgaaattaccttatatattgataaaaggaaaattacactaatatcctaacataccttgaagaaaataatattcatggttaaaaattataatcaaatttgggatgatttacctgcattaaaatcaaataattattgaaaataataatattttacttgatttaaatacaacttcagcaatttttaattcatgtccttcaatttataatataaaatttcgttcattattaactgaattaaaaggtattaaaaattccatagagatacaaaatttaaggaaatctacaattatttgattcaattgcaattataaaattattttattggatttattctaattgtgaaaatacaaaaattacatcattaacagaattagatattgtttcaaaattagaaaatttacgttataaaaatgaaaattatagaggtccaagttttaaatcaattattgcaactggtttaaatagtgcaattgttcattatgaaccaacaattttatcaaattgtaaaataaaagataataatattttattattagatattggaggtcaataccttaatggtacaacagatataactagaagtatatttataaccacagataatacttcacctaatgataaaattaaattagcatattcattagttttatcaggtcatattaatgtatcaaaattaaaatttaaatatggtacatcaaatgaaaagattgattcaattgcaagagaagatttaaaaaaatttaatatgacatatggacatggtacaggacatggaattgataattttatttgtgttcattcaggacctgcaggtttagcaccaaataaaacttcatataattataaattattaaataatggatcatttattagtattgaacctggatattatcttgaaaatgaatttggtattagaattgaaagtgatattttagttcaatggtttgatgaatttaataaaattttaaattttgaatatacaacattagtaccattttgtaatgaattaattgatattaaatatttatcaaatgaacaaattaattggattaataattatcatgaaaatataagaaatataatgaaagattatttaaataatgatgaatatgaatggttagttgaatatactaaggatattaacttatcttctctctaagttgaatattttagttcctctaatggtgaatcaaattgaattatattatttaattttattaatataataaaattgacaaagtatattatcatattctaattcccaaccatcaggtaatttatttgatatatttgatttattataattattataattttgtggtattagaaattcattattagatatagtttcttgaattgattcggagttagttgattttggtgttatctttttatttttaaaaagattgaagtttgtatttttcataaggttaaacattgtttgataagttaagatgagttaagataagataagattagataaggataataaaagaaggaaatagggaatagaaaagggttacaagtggatacattcatggtttatataccatttgaccagatagatatcaaaaagtatttgtaattatattgtatttgtaatatgaaagaaaatacacggatttaaagggaaaatttttcatggaaataggagaattctgtatgtccggattataaatgctttatctctttatctcctaaagggtaaggactggtttgtattgtattgtattgttagtagtatagtatacttatatatatgctgtgatatatccgtagtgcttatagtgtttgatattagtatttataagtagggatataaccggtgttaatagtagataatacataataccgcgtatcatagtgattatgaatacatttaagtaataatatcaacaacgtgtagatttcctttttttatctccgttttcagtcaagtgaacagtgatgccagcaaagggttggagaaaggatgaacaagaatctaatttagatactatattacttaatgaaaatttaagtattgataattttgtattcccaaaatcaattataacgaaaatttgtaaatcagtaattaattcaaatgatggtgaaaaatatttattagcaaaggatactcaaataattattcaaagagcaagtattttatttataaattttatttatcatcatgcaaagcaattagttaaggcaaataataggaaaattgttaatgcagatgatataattaatgctttatcaattgttggattttcaaattttaaatttttattagataatgaattagatgcatttaataaacgtaaagaagctaaaaagttggagaaggcaagggcaaaggaattaaataataataatggtggtaataataaggaaattgatgatgaaattgatgatgataatgataataatagtaataatgaagaatcttcaaagagagttaaattagatgaaaatgcagtgatagtgaataatgatgatgatgatgatgatggtgaagaggataatgaggatgaagaaatagaggaagatatagaggaagatgatgaagatgaagaggatatagatgaagatatagaagaaaacgatgatactaatacaaaagtatcacaatttgaattagaacaaaaggaattagaaggacaagatcctgataatgaaatacataataatgatacagaagatgtcgatgtcgatattgatgttgacattgatgttgtttaattttaattatatacaataatatacaataaatactaataccatttagctcctataaatataactgataaaacaattattattataataattataattataagtaatttcatattttcaaacatcatattccttttaatctttatagttcttcttctaaaagagtttgaatttgtatttaaatttgatgttttattaattaatgaatctaaattatcacctctaattaaaattttatcaatattatcattcattatttctctaacttgagaaatttcatcttcaactgatccataattttgaactaattgaattaatttaccctcttcttgaattataatttcttttaaccttatcttaaattcaaaccttttattaaaattataatattcattaatatattcatttgataatttttctaataaattattaacaaaactacttaataatttattactacataatataacaattgtaattaaatcactattctccattaatatcttcttataataaatttctaaattaatatctttattatttatacgtaaatttttagataaatttatatgatcaattctattctcttgaatttcattaatttcacctaatttttgtgaaattatttcaacataattaacatcattcttattcatattattattattattatcatatgaataaattgttgttgaattaatacttaaacaacaataaattatattaacagtttcatcaaatggtatgttatcattaatattattaccgttaatatcattattatcattattatcattattattaactaatggttcatcagacattttgctgtatatacctactatccctctttcctaccgatcaaaccctattacaggcagaattcattgtctatagaagaaacaagaaactatatatcaacacttaaacggaatccaattaaagtaatttaattcctcatttcccgcaatgtcaactttacttagccacatgttaatcgattataacggttttgatcattatcatcgtatacttgcaatacatcttataataatattaatgtaagtaacttatctctcctatataatatatactactggatattaactaacttgtattcataacttcacatggatattctctaaaatacccatttttcactttcttggaggctcgttatctaactatttatacaattaactatactttaatgctctttaaataaagtttatacacaggatactcccaataaagcatttatcaccaatgattcacacacaaacacccatgataactataataaaactccatagaactctttaagagtagtataaaatatactaaccacaacattaactcatgtcatacaccctaaatatctccctacttcattaaattgaatctactatgataataaatatcagtaaaatcactaatcattataatatcaacttcttcacctcttatatcttcaatgatattaaccttacaattaactttatcaattttattaccataacttcttggtgattctctctttattgcatataattcatcctttgataaattacaaataatgacaaaccatgtctctctctgtggtttagaaaatttcggtgcataaatcttaaaatctttacgatacattggattttcatgaactaattcaacttcaatttctttattattaacctgttgattaattaaaaatttacccgttgataatgtacttgcaactttaataaattcttccctcttattctttgaaactcttaatttatccattattttattatattcattcctctttttaattttaccaatacttttcaatgtaatcttatcactatcagcaataactggattccattcactaccatctaaatcatatacttcattaacattatcacatttcttgatttttaatccaggtaatgtataaacaaaatcatcatcaaaccaacatccttgtttaatacattgcataactttaataaaattaattgttgttgataaaaatctcatctctgatgttgcatcaatatatgcttgtaaaatacgtaaactttgatctaaaactgatattgtatcttgtgaataatctgcaattggtaattcaactcgactcatatatgcttgtaacaataaaaatgctttaatatgtggatcccaaataaattcataatcctctaaatcatcagctgaatatctcatctcttgtgacatctccatattgattaattcctctccatgtctagttggtaattcatcatattcagttgcttcacataaccatcttaaacattgtctaaaactaccatttggtgtaactttatttaataaatttctaatagttttatgtgataaataataatatgatgaaatttgtaaaaatggtgtaccttcaatcttatcacctgttgaaattaaacatttggattcaattaaattctcaataactttatcaattaatccacttaaatatttactaataccatcctgtgaaatatcctcaattccataatatgttggattatgatgtgctcttctatataaaaatgtccatgttaaaaaatccattgcctcttgtcttgatttaattgtacctgatgatatttcagcaccaatatgattatctaaaactttatgtaatgatgattcaactgggaatccaacattaagaaaatgtttataaaatgtctttttggattctttagtgaaaaccattgcaataccacttgtatcaaatgctggtctaccagctctacccatcatttgtaaaatatctgttaaatccatatctctataaccttcaatttttgcatcaaaaaattgtgtacctttaataataactaaatgtgcaggtaaattaacaccccaagctaatgttgatgttgcaattaaaatttgaattttattttgttcaaataatttatgtgaaatttgtctatcactttcaactaaacctgcatgatgtaatccaataccaaattgtagtgataatttcaatgtttcatcctttactttatcaatatgtgatgataattcatattcatccattttaagaaatctacgtggattatcttccataccacatagatgaattatatctaatgcagttattcttgtctgtcttcttgatgcaacaaaaattaaaaccggtttagttggagaatgttgcttaattgccataaatgcaggtttattcattgttttcattaatggacaaaatgctaaattatcaggaaatccatcaatatacatctttaatggaacaggtctaacactttgtgggaaattaaataatccttccttaacaccaagccaacttgccatatccattgcatttgaaactgctgttgataatcctaataatctaataggttttttggtaaatgatgaaatataattcattctactaacaatcatttctagaattggacctctatcgcttgctaataaatgaatttcatccattataactaatgaaatttgttgaacaaattttctactttgccaattacgtgaaataccatcaaatttttcaggtgttgtaataattatatcagcttctctaacttcttgaataccaggtaaagaatcaccagttaattcaacaatcttatgatttgtatttgcacaaattctagctctccaatcatcaactctttctctaactaatgctttcattggtgcaatataaacaattttagatcccggaaattcattaaatgcatgccaaatagctaattctgcaacaacagttttacctgaaccagttggtgaaccaacgaaaacacttgaattcgtgttatataaagtatgaaatgtcattgtttgcattggattaaaatatttaaatttacttgtgtaaattgtctcaatttcatcgctatgtaatgcagtcataggtaatggatgtaattttaataacttagttctaactgtatcattatgaggtttaattaaatgtttaaatgaaagtgcaaccgaagtttctgatcctaaccaggaatcactaatcgctctaacaataatttgtggaggtgcaggatctgtgagtggaatcataaaatcaagttcatgtggtgatccaaatgaccttttattcaaaataaatttttcaaaatgtaaaatattggatttatcactatcttcaactaaaatccagaaaaattgtgcattaccatgataatcaaaattccaaataaaatcaggttcaatatttaaatgaattctcataacattagttgtaattgggaaacattcaacatcaactaataaatatgggaaacgtccaactaatttatgtaattttggtcccattcctctattatgaactaattcacctaattccgcaggttctaaatctcttaaatgatccattgttggctttttagcttcaattaaactgataatttgtggttgtaattgaaattgattcattggatgttgaaatggccataattgcttatcaacagctttacaaatttcaagcatatgtctagtgaaaacaccccatcttctatttaatcccataaaaaataatgaacgacaaatacgtgcagcattttgtgcaatatatgccatatctgatgaaagcgatgaatctttaacaaaagcttttgaaatataagattgtaataaaacatttgttttcctttgtgaactttctaatttgggtcctatttcacagacaactttatctgtttgtaattcctctaattctttagcctcctcatctctaaacttaacattatcaaattcagaactcattgagataatacttcaaaacatcagcttcagtagcatttgaattaataagttgattgaaaacttcaacagattcatttaataagtaaaagtctgaagaaattctaccaatatcttttggaataaaaccttgtgatctttcatcaaaaacaatcatttgtaatttatgtagttttctagctgcatcaataatcataacacgtcttctttgaactaataatggatcatccgcaacttcttgccatccaataccataagcaaatggattttgtttcattctaacataaagatatgtgtaaccaagccattggataccttcttcaacattagtaactgtaccgagtgaaatttctgcatttaagttatcaactaatttagcagataatttagactcaattggatgttgttgtaataataatgatatataatgatctaatctatcagcagttgtacacaatataccaataccatgagcttcaaattgaggtctaccagctctaccaaaaatttggataacatcagaaattcctaaatcaacaaaaccaccctgttttgaatcataaacttgtgtacctttaataatgacagcagctgcaggtaaattaacaccccaagccaaagttgcagtacatatcaataccttaattgcaccggctaaaaacattttttcagtgatatttctgtcagacctacccatacctgcatgatgaataccgaaaccacctgcaaataattctctagagtctttattcctatttttacccatttctctctcaaaatattcatatttttctgaatcagtacaatcaaaatatggcccatatgattgatctcttatcattttcataaaagttctagcagttttaacagtgtctttacgagaatgaacaaaaaccataacctggtgtccctctttcatcatttcaatcaattttgtaaaagatacctcatctaaattttctctagcttgcttagatccggctttacccttaaccccaactaattgttgttctaatggaacaggtctaaatgattgatcaaagaaaaacataccaacatttctattaacacccaagaaatctgcaacatccacaaaatttggaagagttgcagataaaccaacaattctaatcattgactgtgaactttcaacttgtcttaatgttcttgcaactaaagtttcaataacactacctctatcttcatgtaataaatggacttcatcgatgaattaatagtttaactttttccactaattcggtatcaccattagatttacgtgtaacaacatcccacttttctggagttgtaacaataatttgagtagtcattatttcagctttggtaagctgcatatcaccagttaattctctaacttgaatatttaaccatgctaattttttagagaatttttcaacaatttcagctgcaagtgcttttaatggagcaacatacactatcttgaattcgtctagatcaatatcaacattgacagcatcatcttctatagaatcactttctgatatgaattgtttaatggtatgtaaaattgttaataatgcaacatctgttttacctgcaccagttggagcacaaactaacatattttcattagtattatatccaacatcataaatcaaaggattgcattctatttaatgctttataacctttaaaggtaccctgacagaggaaatctaactctttaatcggcacaaatatgttaggagcagatgaatttctcttttcactctttggaattataacttcttcatatttctcaaatgattcacgcatagaacctgctggtaaagtgtatgatttacctgtaaatgaaagcatattcccagcatcatgagctctgaaaacatgtgggtaattatttactgatttttccttagctaagggctgttcccttgctctttttgcattttcatgcaactttagccttaatctgatcaactgtcatcaattgactactttttttagatttcatttcttttttcttattcatttcatcatattgttttaaaatttctgctttagaagttgctaatttagaaataagatcaaattcgtcgaatcctaaagtatcaaataattgaccttgtaaacctgcatcagattcttcattctttaacattgatataatattttcaaataattgtaaataagttatcattaatctcttcaccatctgtatgtttcatatgaattcttctagcattcttcctttatttcattaataaggaataattttgtactttcatcatcactatatgattcatcattatcattatcacttgaatcattacctgattcactatttaaattttcatattctaataataagtcatcatctaaattttcaaattgtttaaataacttgaatgaacatttctatgtatttcagattttgtattagatatggtatcttcatttaataaatttgatggtaaattaaatgatttttcttcattttctatatgaaaactagcaagcttctctcgcattggatccattgcttgcatataggatccagtagatgagacattatatgtcgccatcttatgttaggtgtgtttgtttgtttaaaagggagttaaggatataaagatttgtcattactcatatagtgaagagtaattttctccatctaccataatgcgaagtttacaaattcatgttaacggattaagtacctcttttaagttaatgcggtgcttttttagcgtgtattatagtagttatatattgtagaaactgaaattcaaaattatagaatattaaaataaatgtagtagatgaatagtttaataaaaaagaagaaggagaaaaaaaaagtgtagattggaattcgaatttgttaaaatttgtaatgtaagtcatatagttaatgaattatgtaagaatgtcagtaaagtaattattagcaaaattgtaagtattataatattgtagttatattatcagtgtgtgaaacgaagtttgtttgttttttcaattcaaaaaaatttcttttataaatcaaattgaccattaacaaattcatcatcgacatccatattatcatcatcatcttctaactcttcttcaatttcactttgttcatcaacaacttcttcatcaggtggtaaatttggattaccaggaataaaggaaccatattgtggtttatatgaacctctccttcccattgatggattaaaatgatcaaacattgttgaatcatcaacatatgtaaaacctttaaaattttcttgaacagcttgtgataaaggtgttgaacccattattaattgtctattaattgcagaagttgaagcattagtaaattcaggatcaaaatttgaagtatctaattcatttgcaatatgaggtacgaaaggtggaggtaattttttatcttttaaattattccaatcaatatcacaaaggaatacagtgttcctttaatgaaattgcaccatcaactgcacctaatctatgttttggatttctatttaacaatcctttaacaaaatttctaccttgaggtgataaaacttcttttggaaatctaactttaccaaatgcaatatttttatacatttgttgagtattttctgcataaaatggtgaccaaccacaacacatttcaaaaactaaaacacctaatgaccaaaaatcaaccatttttgtatatccagattcatctaataaaacttctggagctaaatattcagttgtaccacaaaatgtatttgttgtaccattaccacttaaatttgcctttgataaaccaaaatcacataatgcaatatgaccatttgcatctaataaaatattttctggtttcaaatctctataaacaatatcattattatgtaaatgttctaatgccaggactaattcagcaatatagaatctagctctttcttcactgaatctaccttctttttgtaaatgccaaaataattcaccaccactcataaaatcagtaactaaataaagatctgttggagtttgaaaagaaaatttcagtccaacaataaatggtgattcagttgttgcagttctaactaaaatatttctttcaccaattgtatgagcaatttctctttttttgacaataacttgttttgataaaactttcattgcataaattctttttgaatctttctttttaacttggaaaacttgaccaaatgtacctttacctaaaagtcttaaaatttcaaaatcatttggaccataatgtcttttacgaatatttgaatattctaatttaattttaattttaccagttacaggttcatttggtaatctttgatgtaaatcataccattgttcaactcttgaatcatcaattgtttttggtgatatattaacatgacctaagaatgaaccatcgattgctgcatcataaattgaaatttttaattgagaacttgcaccgataacatcaaaaattgctgtatgtttccaaacaggatttgaaggattataaagatgttttgatgatggctttctatttgaaggtaataattgtaatggattttggttatgagaattcattaatgtattattatttgtaatcataccttcaggaccatttgtaacgatttcagatgattcaaaagtacaaacaacataaggttgagagaatgatgaagaaacatttaaaccattagcttcaacgattttgatacgtaatttacctctttgaacattatcataagtatcagcagcattagttatagcataattatgagttttattaattgaattgaaattttgttgatgttgttgttgatgattattggtatttgaattatttatatttttactactcatgttgttaatattaatattaatattttcatcattttcaatttcattttcattattttgattttgagtattagtactactactactattattattattattagaaatatttagttgtgcagttaaattactttgttgagtatgatcgaattggttcattgatctatttaaagcatttggatcttttatagttgtacccattgcataagagttttcatttataccaattgttggagttggatgaggtaatatttttgaaggaaaagcagaaggagataccatttgttttaattgttcgcccccctgttgatattgattgatattattattattattattattattaatattagtattattagtaatttctatattttgattactattattatgactatgagtttgagtattatttaattgattattaaattgattattattgttaatattattattactattgttaataatattattttgattattactaattgaatcggtaagaggtgacttttgtttggcaaagccaaagaaatttttagcaaagtccggcataattgacgctgttaacagatccagtattggtagggggattgaagaatgagcgtatagattgagttgagttcaattaaagaatagaattgaattaaaatagagtaataatataaaactattctgtgacaatagcaataagactgtattatatgacaggaataatatattgtataatttacagtaaaaccaccaaaaactgttgagattattattattaagattaaatggaatttcttttttttctgagaaattaaaattcaaaattcaaaattttttctttttctttttcttattaaaattgaatttaaatttaaaattgaaattgggaggcgagattttcccttatattaattaagctctgtctttattttcctttagtattggtatatagtgaagtatatcgatgtatttctatgttgatgaaattgtttaattgtaattgtaattgtaattgtaattgtaattgtaattgtaattgtaattgtaatgatagtaactatcgatagatacagcatataataaaatagccttttattcctcactcactttttacttaaactgtttacactctgtctgttactgttatcagccaattttctgtctatgtctatttctccccttatttataaattaaatcatattctgcttatatcattatcttatcttatcatatcttatcttatcaaataatttgtacaaattattgtattctattccagtggtaataaatacaattaattatgcaatgtctcttataattctgatgaggtaatttgcagctgagccgccataacgtctttttctcctattaatagagaaaacacatataatatattacactccattgcattatatcataattacagatactacatacaagtaattatcctacacacacttactataattgtattcaaatacaatacagtaaacaatcaatgataatcaaactggtaaagaatagaatatataaaccataaagaatgagccttgtactatttgcaatcaatcactaattttctgagaaagcgctgcctcattgattaattaattacgggaatttttaatgagtggtcaattaattgtatacaatttagattaaagtaaacaacatttgattctagatttttattatctgatattaaatatattatatcactatttattcaattgagtacctctatatcaatcaatcaataaataaattaataaatagacataccaataaattatgacagtacgccgctctactagaattgcttctcaaaaggaagatttatcagtcattgctgataagaaaataacttccaatgctcgtgtttctaaaccagttgctgataaaaaagttacaaaagttgttaaaaagactaaaccagttgtaaaaactactccagttgtaaagaaaagtaaatcacgttccgctaagaaggaagatgctattgttgttgatgatgatgatgataaagaggatgataaagaaaaaataacaattgatgatgaagaagaagaagatgaggaggaagaagaaattaaagaattaaatgaaggtgataagattccagaatcaattgaagttgaattacaagattcaactaagattaatttatcaaaatatgcaaaagataatcatattttagttattttcgcatatccaaaagcatcaacaccaggttgtacaagacaagctaaaggattcagagatgaatttgatgatttaaagaaattaaatgcaacagttttaggattaagtgcagataattcaaaatctcaaacttcatttaagaataaacaagaattaccatataatttaattgctgatacaaaattacaattaattacattattaggttgtaaaaaatttccaaataagataactagatcacattttatctttgttgatggtattttaaagattaaaaaaattaaaattagtccagaggatagttttaaaactgcattagaggatattaagaaattacaatagatagataaatagatatttgcatttattgattagaatgtatttttataattatgtgattcatttcttttaaattttaatttttatttataaaaaaagaagctgaaaaaaacatgtacacaaaatttattaatgatattaagatatgaaatattactattataatcaacttaacggttagatttagcaactctttctaattcatccttcttcttaatagcataagaagttgaagaaccctttgcagcgttaactaattcttctgctaaacattcagcaatagtcttgatatttctgaaagcagcttctctagcaccaatagttaataaagcaatagcttggttaactcttcttaatggagaaacatcaacagcttgtcttctaactgcaccagcagaaccaattctagtagtatcttctcttgcaccggtgttaacaatagcatcaacaataacttgtaatgggttttgatcggataaaacttgaataatttccatagcatgtttgataattctaacagcctttaattttttaccgttatttctaccgttcatcattaaagagttagttaatctttcaataattggacattgagcttttctaaatctcttagttgcatatctaccagcagtatgagcaacgaaaacaggttgtctgatttgaatgtaatcagttaaggaaatatccttaacaacaacatcttcaaatgaccatttgttgaaaagtttaatttctgaagcaccattttgaatttcctttggaattggagttgctaattcaacatatttaacttcaactggttcagagataatttcttcttcaaattgttgttgttcttcgacgtcagacattgttttgattgatgaatatgaactaatagatataattttaaaagattttctgaaaaagatagatcaaatatttaatatagattcatttcattaatatatcactatactagttaagttgaaaaattaaagaatgaaaaaaaaagttttgaaaaattgaaaaaaatcgagcaatttactaagtcacaccttcctaaaagcgtaataaccactcgacaccactcaatgaaaaagaattcgcgctttcctcattggcccaattaggaagtacccatgcaaaaagtggttacccggatcaaacgttggttatctttaaaatttcctgatggtcccaattaggaaggtagttttcaagaaacagttacccggatatcaaattatagtcaagtgtcacgtgacatcaataatgattacataatcaaagaaaaatctcggaattcggagtttctctttaaattatccttaacctacatctaccccgcattgttgagatgatccacttttcccttattccttaaaattcccttatttcatcattttaagggtttctccacatgcttgattttatccattccgtttatcttatcttataaataataaatgatattcaattatttaatatttagtttcttgccttttaactatttattttttaaatcttattaatatacccatctttaaacaacaatgcctttgactttcgaaagagaagattctttaccaactttaccagttccagatttacaacaatctttacttaaagctctagaagctacaaaacctttaatatcagaaaatgattataataatttaattgatgaagctcaaaattttgtaaattcttcaatttctcaaactttacaatctcatcttattgaattgtcgaaaaaaaatattaattatttaaattctccaggtattttctcaacaaactcaaatatttatggtgatttacgtggtcaaactttacctcgtaatcctttctttatacttgaagatgatccaatgaaaaatttctctccaactcaagaatatagagccgctgtcttaattacttcaactttaagatttatagttgctttgaaaaatggtattttaaaatcagattcaaatccttcaactaatgatccttatacaatgtcttcttatcataatttatttggtacctgtgttatacctcaagataatggtattcaaatgaaaaaatttaaaaattcaaaacatgtagttttcttatcaaatggtcaatttttctcgttaactgttttatcagaaattgatcaaatttggttctcaaaacatgaattatgtgcaattattaaaaaaattattgaagtttctaaagatgagacagataattcaaataatattaatataagtacttttacaagtgaatcaaagagtacttggaaaatggcaagattatcattagaaaaattaaatccaaaacaaatggaaattattgatagtgctctatttcattatatcaattgataatgaatcaattaatattaataataatcaagaaaaaattcaatttgtttctcatggtacttctaaaattgataaaaatggtaatcaatatggtacttgtattaatcgttattatgataaattaaatttagttgttactaaaaatgcaactgcagcatgtatttatcctgcttcaattattgatggtacaactgttttaagatatattagtgatgtttatacagattcagttttaagattagctagaatgattaatggtaaaaattatactctttggaatgaaattaatacagttccaatcaataatgaaattattaaaccagattttgctcatattaaatttaattataataatgaaatcgtgaatggtttaaatttagctgaatcaagattagctgatataattaatcaacatgaatatgtttcaaagaaaatcttattaggtaaaaattatattaaaaataaaatgcaattatcttgtgattcatttattcagttatgtatacaaattacttattatgcattatatggtaaatgtccttcaacttttgaacctgtttcaacaagaaaatttagagatgcaagaactgaaccaatttgtattcaaaatgaaaatattttaaaattatgtcaatcttttatatctcaaacaacagattctgaaaaatggaaattacttttaacttcaattaattctcataaacaactggcaattgatgcaagtaatggtctaggatttgaaagacatttcagttcattaagatcagcatttattcaatctaaaattttaaatgaaattaatgataaaataccaaaaattgaaacaaatttaattccaaaatttttatttaatccaattttagattcaatctataaacctgaaattgttgcagcaaattgtggtaatcctgcacttgattattttggtataacaccttcaataccttcaggttatggatttggttatattataaaagatgactatataacaattgttggatcatcacaatggagacaaacttcaagatttttagatacacttgaaagagttatttttaatattaaacaaatttggaaaaatgttgttgttaataaagattcaagagattcagaattacaaaaatatgtttcatcaattccaatgtcaatgattcaatcaaataattcctggttaccatctgcattaacaaataataataaacaaactgcatcaactgttacaactgatgcatatattttaggtggttatgattattttgatgttgaaaaattaaattgtagatcagaaatggcatcaaatgctcaaagtagagctttaagtagagttaatagtcaaattaatttgggtggtaaagtaccaagttttaagaatgttaaatctgctttccatgataaacctgcatcaaatgttggaagactgattagtattcaacctgacctataaaatataataatagtacaaacgaaaaataaaaacaaacaattcattttctattttctatttcctatattttctttttaatgaccttaaatttatatatcatgatcaatactttctaattttttaactttttcatctaaatcactgaaatctatagctaatataacatttgccaaaattaataaactaccagcaattacaaagcacacccataaacatccagcctctgcaaaaaatcctgtagaaaaaggactaattgatcttgcaatttgtttaccaatattaacagtacccataacttttggtaattccattggttcaattaatgaagttaaaatgatttgtcttggaacaacatcaaaggcagtagttaattgatttaataagtataatattgaagcagattgaaaattataacctaaaattggaattaaaataaagaataaaccacaaggtatttgagtcaaaattgatgatttaattggaccaaattttttagcaaaccaagcactaggtaatgcagaaattgatgtcattaaacctgcaaatccaaataatgtacctaatacaaatgcagatttcaaatatcttttttcaaaataataaacaatccaagcatttgtcataaatccataaccaaatgaatcaatcatgaatggaactaataatttgaataagattttctgtgttgaagaggataatcctgttattgttgtgtgttcaacagttgattgaattcttaacaatggacgatgttcatcattttcacttgttaatgaagatgaacgttccataatattatcttgattttcattaattgaatcattattattttctatattttcattatttgataatttataatcaggtatataagaaggttcagcacgataatgatatgaacaataatgaaataaatttaaagattgatgttgctaagataacataaaatgtatatctataagcctttttcattgaaaatccataattttagaaagtttatcaacaataaaaccagcacttattgaacctaatgaagaacctaatgaacctaaaatccaatgaattgcataaacttctggtctatgattaggtggagttaaattagccaatacagtttcttcaatacttttaaatggacctgcatcattaccagaaggtgaaataacaccaacaattgcagcaaataataaataattaaaattttcagtaccagttgcaaatattgtacttgcaattatcattaaaaatccacccaataacattataaatctattacctattttagttgaattccaagtaagtatataagatataattgaatcaccaatcattgttaatgacatgaaaataccaatattaacttcatgatatacccaattctgcaagatataaggttaaaacttgattagttataccgaaactaatcattctaatgaaaactgaaaaccatagtagacgtatatctgaatttgattgacgtaaagatcttaaaacatgaactcccatcgtatataatcctttatctaatccttatcaacaagatcaacaaaaacatataatcaacaactctaactccatccatcaacaaacatctccgattccgatgaaaataaaaagaaattttccaatttttcaaaaatttattttaaaatacatagaaaagtgaaaaatttggaaaaattcaactttgccgtgtaatgttacggtattgtgctggaatggggggccgtagatgaagacttttatgtcttttacacttgctattcggttatatatgggggtgagaatatattctacatggcattatacacttcttagtcagttgatcactttattattaatatagtacctatcccatctactgtagaataccagtacaatataactttttaagaaaaataaaaccggaactttctctataggaaaaaaaaatctctcattaagatcagttaagtattattattattattattaaatttattttattttattttgagttgatttcatgcatcttttaatttcctttatagttttatatttgtagattctgtaatattatcatactgaaaggtatatttataccatatttggaacccatattatataggtttatgacgtccgaattcaatagtcaaacagatatgcaaatgccggaacaggagttacatcctggagtacggactagaaaatataatatgaaaaattccaataataataatactaataacaacaatagcaataaccataacgattttaatcaattatcaaatgaaaatgtttcaggtaatagtaaatcagataatacaaaatcatctaatagacaaagacaaaataaacgtttgaagaaaattgcttgtacagaatgtagacaacaaaaggcaaaatgtgatgcatctgagaaacaacctggtccatgttcaagatgtgaaaaacgaaatataccttgtaaacttgatcaggagtttaaaagaacttttaaaagggctaaaattgatgaattagttaaagaatatgaaattataaaatcaaaattgaaaatcagttcaggctcaattagtatgactgataatagtccaattaatagtccaatttcaaatagtaattcaaattcaagctacaataatataaaatttgtacagaatgatatacctaatagtaataaccataatagccataatactttattaccacaatcaagtgcctattttataaataatacccaaaatcaattcttaccatctctgaaatctatacaaccaaataataacaatcaatttaacaccggtatgtcacttcctgatccaaacatattccatccaacaacaaataatggtaatagtagtaacatcacaactccaactcctataccaattccaatatcaaatacaacattcataaatactgttacaacaagtaaatctaatcaaccacaatcaataaatgtttcaagaagtacatctttctattctaataataccaccaaggcaaatagccctttaactagatcttactctccaattcaaatgataaataatcatacaaattctccattggctcaattaccttcatatactaataatctcaataataacagcaataacaataataatattggtactaatagtgataattcagatcagagtaaaaacttaaacagggttaacagttacaatttctcaacattaatatctgccgcaaatgtcactgaacgtaataataatatgaataacaactataacagttctaatcatgattccaatctgtattcaagatggaaagcacaaaatcgtcccgtacggaaaccacatatcaaatcatcattattagagtgtacttcaaaaacactaggtgatattacattaactgataaacaaattgttgtattatattcaacatttctaacttattatcatccattattgccagttattgatatggaaaaagaaattgaaaaaatttatagattatgcccagctttattttggacaattatgtttacagcattaagaggtcatcatacattattaccagtaattacaccagaggaatgtagatcattatatttcaaattatcaccaattttgaaaggtatattagctgaaattacaatttctccaatcacaagatatgtaccaaatgaagttgatgaaccaattttaaatgcttcaagtgtttattcagttcaagcatttttaatttatacattttggcctccattaacttcatcattaagtgcagattcaagttggaatacaatcggtattgcattttatcaagcaattagaattggtttacatacacctggtttaacatccgatagaatgaaattaacaaataaagatttaatgaatgaacaaattagaacttggattgcttgtaatatagtttctcaaacaattgcatcagtttttggattcccaggatttttccaaccttttggttcattatcattatcatcatcattaaatggtgatgaaattccacattgtttaagacaaatgctggaaattgaaaaatttgaagctcaagttgagaaaactttaaataataattcatttgatcaattacaattaaaccctgcatctgatagattaccattaattcaattattagaaagtgaattgaatcaacttgaattaaaattatgtgcctatgaggaatgctcaatggatgattttagaattttatcattatatgcaacaaggttacatttattaagttattattttatggataatagagaaattgcaagttttgaattgaaaaaaggtataattaaagcatataatgcggctttagccataattcaacattgtaaaaactcacaagatagagcacctgactttgttaataatttaccaagttcatatattttagtaatatggcaagcatcagttataattgcgagattaattaattcatcatataaaaatatactggatatttcaactggtattcaattatatcaaattgcaattgaattagtaatgaaatcttccgttattaaacatgatttatcttatagatcatgtggtataatgaaatcaacatggaatttatttaaaacattggatgaagacaatccggaatcattatttcaaattaatgttagatcaagaatgtcagctaatattttctttgatacattatgggtcttaagagaaaaatgtggtatgattaaattaaaaccaacgagggagaagaatagtgtaagtgaaggaagtacaggatctgatagtgaagttgaagatgttggtgaaagaaatgataataatgataatactgatagtatttcacatccaaataccattaaaagtgaatcaacaattcctgatatttctaaaagaattagtcatagtggaactccagagtcaatgggtaaagaatatagatctcaaagtaaagatagtagtttgtcaagtaggaggaaatctaattatcatccagaatccgctgctagaagaattatcagtacaattccacttgatcctcaaccaattgcattagctgaaacttcaaatgatagtgctcatagtagtaaacatagttcaccatatatttccaactacaaatcaccatcaaatacaacaaatacatctgaagccactatcaaaaagatgttcacaccacagagtaatcataataatccacaaaatcaccatgttcgatcaccgcaagcaagttctaaacattacagtaattacaataatattaataatgaaaataataattcaaaatctaacaacaacaacaacaacaacaacaataataacttggaatcatctatggtaactacaccaggtttaatcaataacaatatgaacttaaatatggatctgaataacaatgacgttttcacggctaataattggaatcttggtactgaaattgattcagatatgctatttaaagatatcgagtcagttatggatgaatttgggtttcatgcagagtaataagtttactgtttttttaatagaatgtataataatttgtaaataaaattcaaaataatgtgagataaaacaggtacaacaactggaatagatcatctagatggaaaacactaaatttccgaaagttgcgcggaaatttccggcaactaagcttaaaaacaactgaaatttccgacttaaaattttcacgaatttttttttttgattttttggaaatttcatgaaaagtgaaatttgaatcctgtttgagaggatggagtggaaggatttgatttataaattataaattgtgaatctaaagtctcttaccgagtttatatcgttaagtaaacaatgccagcagaacttcaagacgctattccagatattgtagttggttgtgacgaaccagtcgaagaacctgcatatgaaagtgaaaatgaattagatgaattagttgatgattcaaaggctagtaaaaaagttagttttgcagatttagatgatgaaaatggtgaaactgaagaagaattaagaaaaagagaatttgaagaaggtggtggattacctgaacaacctgttaatccagatattgctaacttaactccaatttcacctgaaattattaatagacaagcaactatcaatattggtaccatcggtcacgtcgcccatggtaaatctactgttgttagagctatctccggtgttcaaaccgttagattcaagaatgaattggaaagaaatattactattaaattaggttatgcaaatgctaaaatttacaaatgtaataatccagaatgtccagaacctgattgttaccgttcatataagagtgataaagaaattcatccaaagtgtgaacgtgaaggttgtgatggtagatataatttaataagacatgtttcattcgttgattgtccaggtcacgatattttaatgagtactatgttgtctggtgcagctgttatggatgcggcacttttattaattgcaggtaatgaaccttgtccacaacctcaaacttctgaacatttagctgctattgaaattatgaaattaaagcatgttgttattttacaaaataaggttgatttaatgaaaaaggaagctgctttagaacatgaaaaatctattcttaagtttattaaaggtactattgcagatggtgctccaattattccaatttctgctcaattaaaatataacattgatgccgttaatatgtgtatggcaaaatcaattccaattcctttaagagatttttcagctcaaccaagattaatggttattagatctttcgatgttaataaaccaggttcagaaattaatgatttaaagggtggtgttgccggtggttccattttaagtggtgtttttagaattggtgatgaaatcgaaattagaccaggtattgttactaaagatgataatggtaaaattcaatgtaaatcaattttctcaagtattatatccttatttgcagaaaacaatgatttgaaatttgcagttcctggtggtttaattggtgttggtactaaagttgatccaacactttgtagagctgatagacttgttggtcaagttgttggtgcaaagggtaacttaccttcagtatttactgatattgaagttaattatttcttattaagaagattattaggtgttaagaccgatgatcaaaagaaggttaaggttagaaacttagaagttgatgatgtgttgatggttaacattggttccactgctaccggtgctagagtagtggctgtcaaggcagatatggctagattaactttaacttctcctgcatgtactgaaattgatgaaaagattgcattatctagacgtattgataaacatttcagattaattggttgggctactattaagaagggtactaccattgatccaatcaattaatgctattcattttaaaaaatttaatcataatctgttaaaaggataaacccaatatcatattataatggaataaatacaacacaccaataatgataactacaattgattagctgatcataaactttttttgttctccatatgggatggggagcaatgtatatttagtattttctttatacaaacttaataaaaatatatgaaacaaaaaattaaataagtaacttcaaagccaagaactgtagttttctttaaataaatctgactctaagaacttaccatatgagtctctttccatcattctataaacttttcttttgatttcttcgtagtaaacacccatatcatccaggaattttaattttggtccaaagaatatgtcagttggagaaacttccggaacatcgacatctcttaaatgttttaactttaagcccaaattcttatgtgatttaacaggtttattgaacttcttatcttcaatttgagttgatattgacttctcagaacttttataatcttcattagtgtcaatttgcttatcaacaacaagagcaccatttctatcttcaactttaacatcatcatcttccttaattaaagcttctgattcttctaattccagtggttcaatagtcctatcattttgaatattcatcttcattctgatatcagaaatattgatatcacttccattgaatataccttcagattgaatataattttgaacttgaaaacgaagttttgaatcaatgttaacctcatttggtgcatcctcggatagatacattgcaaatatagtgtaaagtttagataaacaatattctgtcaacttgttcattgcagtataaatagtcaacctcttgtaatttaatgcatttgatttttgttgttggattgttatttcaaaaactttatcatttttaatttcttctaagtatttacttttctctttatctttcagagaaaccatttttttcaatattttgaccttcttttggaattcaataatttcatcaaataaattcaaattttcaacacacatattttcaatcatgaaagttcttaataaatatttcaaacctggatctgctaatatagcagctaatgtaagtttatttttattaatagacattgaagctgaagatggtgaatcaaaagacgcatttttacttgtacaacttgctggtgatatatttgcattaacaaaccacttgaccgcttggtttccagcaccggttagtacatataatgcatctctgtttggcatgaattgtttatcactttcaaaattatatgatttattttcaattaacccccatttaagaaaattatttgcaattttcaatgcatccttataatacattaaatcagtacaatcaaaaatacattgaactaaagcttttccagagaaacaattgttaacaatgacttcattacccttgatactgacaatcttttgtttgaaaaatctaacacctttattggatacatagtattgaagtatgggaatctgagtccggatttgtaaaaaatctgtgataaaatggtgatacatcattaaaattatttgtaacactaattgaaggactgttattactttcatcaccatctgatacatttaaattttcttcagatgcaacatcattttgtcttttccttaaatattctaaaaatgctgcactatcagttaaagtattattttgaatatcatttgaatcatttgatttatctgcaccaaaaacttgttgattattgaattttggtttcagtgatagagtagatgataaattaggtatttgatcaggaccattctttgaagaccaaatattcatagatggtcccataagacgagcaaataataatttatctgaatgttcattataaataatgttatcagttcttatatgcctttcaaactccatcaattgcattgaattaaagtttgaaaatagtatttcaggaattttaacatcttgtaagtttgaaatacctcttttcaaacaaaattgatataatattgcaacacctttaggacttggttgtaaagtcatttttttacttgtaatttttttacaagttttatcttctgggcaatgtaatagtttggcagaataaaagatttgaagtaaatcaaaagcgaaaatttcattgatttcatatgacagaacagttgatgtcatattataatttaaattaatactcaaattagccatcacttgaatagctttctcaactgtaaaagtataagggaaagttttcttgaagttgaattttaagattgatgaagatttctttacatcattctttaaatctaaacaaaatagcaaaactgcaaatatatttttcaaatcatgatgataaatattcccagacggagttctattcagagattttaatgaaatgtgactacttagattttttgagttattattattcataattatgatgtataatattcaatgttttttatttgataggaatgaaaaataaccaaaattagtttagatgtatgtaaatttattgttatacccctaatgaaataaaaactatattctgattatttcaaaagaatcttgataaacaaataatttaaattattaaagtaagtggataaatggcaacttttaaagtttacctccaaagtttaactatgatatatacacataaactgaattaaacgatccaaatcaaatcaaaatggcatataacggaggatataagttttataaaacagaaaagataaatattattgaataatttgacatgttattgtttcatagtttcatgtttaataaactatatttaagttttctattgatcttgttgtaaatgaaacagtgaacagaaatggaatcaatgtttggaatggtgctgcgccatgtttcatgttgtcaaattttccagtgcttgaaagcgatctacactataattttaagcagaaagggtcttttatagattacggcaactataatagatattgtatagtgtgaatgatagcggagcactggttaaaatactatattattgtaaaagaagaaagttgatgaaaaagaaacgactaaaatttcatcttttagatgatgataacctagatctttaacctattttcttattattttctttccaacttcttttgacttttaatttgaaattaatttgaaagttaaaactagatacatgatatacataagaattttagaattttaaataattctaataactctaaaggttctttttgatattttccatgttaaccatgtgtctagccatcattctagctcttaattcagcgaaattacctggtttacccatatttgataattgaacatcttgaatatcttcagaacgaataattgaaccaacactcataaacataccaaagaaaccagcggaacctaaaatatattgacctaatgtattaacaacaccatttggtgcaccacttttcaaaattgcgtaaccaccgaaaactaaaccggaaactgcaccaactgtagactgtaaaaaaacaaaagaaagaagataaattatgttagtattagttattttgtactattaattaaataaatagcattattgaatacatacacccataaggaaacccatcttcagtttatcgaagagagattgttgttgatattgaacttgaacttgttgaacaggaggcatgctataatgtatatgtgtgaaagctgtgaggttatggtacttcagtaaatgaaactgtaatttaactttactaatccactgctggaaagtgtctttcaatttcaacagtttttcgtcattctcacttagtgaaaatattgattacgtaatcttttacatagtaaaatctatattatacaccactacactatacactacacattccatcctgaccagttaggttgagcacccggttgtcctgtctgctgctgttgttgaggctgctgagaattattccagccgttattgtatgcttgttgctgttgtggtggtggtggctgttgatgcatatttgcataaagtggttcctgtccagcgtaactgctattaaaatgtctcattgtaggaacattgttcattgatccattgatttgattcatttgattcaatgatccaccaactctattattcaattggttcatgtaattcatttgacccatttgtcccacttgtcctacttgattcatttgattcatttgattcatttgattaacttgtcccatttggttcatttgattcatttgattaacttgtcccatttggttcatttgattcatttgtcccatctgtgccatatttaattgattcatttgacccatacccatttgattatattgattcatattggaaaattgatttccattattgccattattgttcatattattattcatattgttcaaattattattattattattattgttattgttacttccattagaattaccaatttcatcagacaatgataaatattgtttcttttgcttttcattcaacataggtttaggtggtaaaacaggattacctttattcgtattattattactaacagccataggtgtaggtatcgaaggaatagctgtctgtgcagctcttgatgattttcttgatctaggaggtggtggaacaggtggtggcgatgcagagattgacccagtccaatcgttgtggagtttgtaaaacttgattatttgttactccaaaattgcttatttgctgtgtattttgtggaacaaatccaaagtagtcgcttcgattcttgcggctgttttgaaagttgtgattgtgacatattgccatgtatttggtgacagatcagcagctagcgggtattgaacttgagttgatgaaaacatagtttgcatagttggtctttctggtattgcattcattgtaacatttgtagattggttaacagaacctgttggtgtagcggcagataatgatgaaatatcgttgaatgaattgctggtattgttgaaattaaaagtttgcttcaaattgttgcataaaatgttctttcattgacttagatgcacttcctgttaaatttggttttaatggttgtaaatcatcaccagaattttgtttatcaagttctcgttgtgtgatatttttaaactgtatctatttgaatgtcctttaattcttcttcctcattctcaggatattgctgttgctgttgttgctgttgttgataaacctgttgttgttgtgcggcattttctatttgtgaaccatgttggctcaccttttagttttgccaataaatcattcatagataaattataatcaagtacatgttgttcaggtcgattaacaattagtgcagcattttccatacttgcttccttttctacaggcgatgaagaaaagctaagaacatctgaaaacttcactccttttattatttttcttctttttctttgttgaattggttggcatttcaccagtcagaataaattcagtaaaactatcaatatctaatttttttgctggttcattaacatttatttcttcttcattctcactatttgttgaatcatcctttctttttgaatgataaaatagatataggatttggaattggtgcaggcaatttgattaaagatttcgtcaacggcttaccatgtaatgcatgtgctaaaagtctcatcaatgcaaagaattgtccaatatttaaagagttggcccatttagagaatgattggactaagtctatctttgataggagctggaattttgaaatttgacataaatttgaagacatcatccattgtcactatctttgtagttacttttctatcttgaatattttcataccatctcaagtaagttttcaattcttttggtgacatatcattgattgttaaagataatggaatcgaactatcattatcagcaattagagtatctgtactactcgaatgtttaatcgtttctttaattggctccagaaaagagtttttgagatttgaaggttttcgaatccattgatgacttaatcttatctaaagtatcatcactatgagaaagtacgttattgtttaaactcatttttgtgaaaatattggacaatccatttccagaactactagttaatgtcgacgagttgttttgattgctactattattagtgttattattagtattattcatattagcattgttattagcattagtgttattgatattattattattgttgttcgtagatggattatacgataccgaatgttttaaatatgcttgaggacttaaattcccaatattattattttgtgtatcagaagttccatttacagagcctctatgttgattaatactcaattgagagttaaagtaatcatcaaaatgatctattgatgcttgtcggttgacattaccaggtgttgccgctgattgggttgataactggacattgccattttgtggattatgcactcccggaattgtattccaatcaaatcctgtatgcatttctattagttaaccttgactataactacaattcagtatataacaataatatatcagacaaaacaacgccactaactgattaaaaagcatacatcccgaaattgcaaagaattgaagagagtcaaattatggaataagtcgagcatcacttgataacgacacttttttctgtcgtagtctatcatgtgcgttatgctattattatattatttttttacttatttcaatgatatttttgatgatatttatacactatttcttttatttttctattaattacagatatattatattgtacattctatatacacgatcagcttttttgtatttcctctagctcatgcatagtaaattcactagagtgactatgagcaaatgaagtagtactaaaatcatcatccacggaaattccatcagatcttgatcttggttttgagcttgattttgatcttgaattagttgctgatttgctagacttggattgctttttctgtattgctcctaataaggcttccgaagtttgttctataaagaaacttgttggtgacatcgacaaattgtattcgtcagatggtggtattgtataatcttctgcgttttctgtgacatcatccttcttagtagtttttggttttgacctggacttcaatttatatttagctttagatttagatttagcattctgtttttcaatcataggatcaataatttgttctaaaactacacccgcatcaagtaattcagttgttgaattattactttcaaataaaccatcacatacaacctcatctactttgttatcgtccgctattaatttcttgctaaatttctctaatttggaatgatcaacagtagagaagaaaattttcttttgtttactaaactcttccttggtcttcgatatttgtaaatttatccatttaagttttgtttgggtatccattgctttatctaatgcttcaacaggtctagggatcttaaaatcagttgatatattctttaactcagattcatcattcaaagagttcaacatttcttggatttctggcttttctagtaattgataaatatctaaactttcaccatgtggaattggatgtggatttgatggtgtaatacaatcaaaatcaacttctttacgtaaaacaaaatcaatatcaacacacgagaagaaagcacaactttgtggtatattctcaattcctaattgataacaaaacatagctcttgtccataaattagcaatttgtaataacattgcacatttatatttatctttttcctttgccagatatctaacttcatcatgcacagtaatagctaatcttaaatcaacaccatatattttagataaatactccattgaaattaacaataaatgtaaatagtcaacaccagatgattgaattgcccaattgatacgtgaaggtaaaaatgatttagagttcaaatttgttctatttaatgcagctgtgatacctgcacctaaaacaggagtttttggatcatcttgttcagcaatattttctaatctgttgaaaacaacactctcagatccaccaaaccatattttgactttatcatctccaccagtatttgttggggttttgattacacttgtattacctttagtttctgcatacaaagttttagcaactttatcagcctcttcatcagtaattgaaggattaaatttctttaataatgatgtcgcaaatttaacacctgcaccataaattctaccataattgaaaacttttgcttcattacgagatatacctaaaattttagcagttttggaatgtaaatctgttccagcatttttagttccttctaatgtcatccaacctaaggcggtaccaccatgtaatttgaaaactgaatcaccaaccaaagatgcaatccaaagttcttcactatcaacatctgcaccaacaaatacatatccaggtggtgcttgaactaatgatttaagttctgatcctaatctatttttcttcgcattagatgctgtaagccaagttttctcaacagctctacgagtaattgtacccattggtataatttgtggaatgataaaacctaactctggttgatctgtgttttcagatgcatctttaaattcatctttagtttcagatatattttttgctttctctgttacttgttgatttaaagtgttttggtaaacaacaaattgattcataatacgttctcttgaagatacccagtaactatttctaacatttgattgaaatgcatcttcagcaattggttcatttgatgtcaatataccttcttcataatatctcaaaaaaggttttgaaattaatgaagtgactcttgcatctgcaccatcctcatggggaattttgaacaatgttttaccactcttaattaactttttcaaattttctcgtactagttcatccttttcaacatagagagattttatatcatcttctaattctttttgggtatctatttcatcatcaaatttaatctcttcctcttcagttacttcagtggctttactttttgatgaaacttttttctttgattctttttttgcttttttggctttacctttaaatttcttttttgtttcaggatcttccagggacatttctaaaataatttgaggattacactgaagataatttttagcaacaaattcatcaatttctgagttttcaactacgaaacaccatcctttactttcagtccaaaaaattggtttattttcccataaaagtttcaacaataagagacaaactctagatttgatcgttaaattaagttcatttttaacgactagtttcttgtaccattcaggataacctggaagtttttgccttttaaatggagtcccatcttttttatatttcacaggtgcaattgtccaatctaattgagataaccatggatcgttttcccatggcggtatagtattcaaatgtttatcctttaactcaacgacactattacaaatcaaatgaacttgagattcaacacggctttttgattcttgatacatttcttcacatctatgtatataatcctcccatttagaattagttggtaaaaatgatgttgttatatgtctcaaagctgcaaaactaacaggatgtgaaacagtttttttatacattggataaactgcatataaaacatgatatgttgcaattacatctttagcacaatatgtcattaaagtttggaaaagatcacgtatttcatttacatcagttgatgcaaaatgatctcttaattgtttttccattttaattccacaatgtagttcagcaacatcacttaatttattcaaagaacttgttttcatccatggatcatcacgtaaactcatactcaaattatcatcatcatcagcagattcttcatctaaaatggcattggatagggtatatcttaattctgagttttgaaccattaatcgataatcttctaaagttttctcttgttctttaattttctccttaacaccttttttatacttcatccaggtccctctctgtctagaacacatcccactaactgcaacatgtaaagacattgtatccaaataaaaagctttggaaggtgttaaactatattcttccaatactcttgctctatcaaatgaaacattatgtccaactattaaacattcacgtgcctctgtattaaatggtataagatgattgtttgtatcactttcacctacaagatatggagaacaccaagagtaccatgcttttctagataaacaagttgccataactgcatatggagaagttttatataaaacttcacaatcatacactagttcatcctctaatggatatggaaccgattctggtggtgaatttggtgaatatcgagtccaaccagattgacatatccattcttttggcattggtaacggtgttgaccctattttcaataaatcatcaattaaattttcatatttataggagcttttcataccaatattatagaaatgttgatttatattatcaccatttaatgtaggtaatttaaaatttattggaggattttcagaacatggtttccccaataattcattatcttgaagatacttaagagatagtttagttaaattatttgaaggacccgttaaagattttttagggaatatttgtgcatgtagtccgtcagacaaatgttgtattccacaagcatttttattaattttagggattttcttagctgatgtagcatagagccttcgccaacttgtgatagttgacattcttgctagtaagaaaccacgataaaatagatattaacattaataataataaatctgactggtattattatatcatgtaaagtaaaatattcatgtgattacgtaacctactgtaataaattcagtaaaattaaaatttcatttcgcacaacgcagtggctgcttcttttgataatgaagagggaggatgataacactaggttgttttattacctttggtgattactgtttctctagttaattaagtatctctcgtaattattacataatgtcctcaaatagagcactgtcagatgaccaagttcaaggtgaattgaagaaaatggaatctttcataacgaaagaagctgaagaaaaggctagagaaattaaaattaaggcagatgaagaatatgaaattgagaaagcttcaattgtacgttctgaaattaatgctattgatgctgcctacaaagataaatttaagaaagcctctcttgcacaacaaattactaaatctactattgcaaataaaactagattaaaggttttagcaactagagaggaagctttagaaactatcttctctggtactcttgatgaattaaagaaattatcatcaaataagacagaatataagaaacttcttgctggtttaattgaagaatgtttctatactttaatggatacttcagttattcttagagtaagaaaggcagatctttcagttgctaaggaagcagctaaaattgcagctgaaaagtttgagaaaatttcaggacaatctgttgaatatacagttgatgaaactagaaatttagataaagatcttgcaggtggtgttcttgctattaatggtacaggtaaaatttcagttgataatactttagatgaaagacttaaactcgtttcagaatctgcacttcctgcaattaaacttgaaatgtttggtccttctccaaacagaaagttctttgattagttaattagttaacaattcatatttataatcaatcatatctctatgtttaaaacaaaataatataaaatatacgtatcataatcaatccaataattaaagattcctatagcaattttttgttttttgaaagatgttataacgtcttctcaacagctactaccttatactctatctacataatcatgttgaaccagagctaagttcatgtagaactctaagtttaactgactattaatcacacatatattgattacgtaatccatagtaaatattatacaaacttaccgtaatcaatttcaatttaaaggtttttccatccttggaagctcccgtagattgttgtttccactccatttattacttgaatcatttagatagaacagttaaattcagaagaaatatcttattagagccgttaaaagattaaaacttgctgaagaatacaagaaatattaaattacatcacatatcattaataataattatcaaatgctgcctcgaactatgtttataccaataaataacacaatacctacaatcatacgatataagggaagaataataaataaaattacaaaaccatattttgtacggccatataatacaaatggatccaatacatccaatacattaccaacttctaaagtactgaaaccaatttcacctgatatatctacagtatcatgtactataatagattttacaggtactgttagagctgtaagtaaaaaattcccaagatcatcatttttacaacaaaataaacttttcccaagagatttaaggaaaattgatgcaactaatgtcgatgttgccccaagtatagctgttagaagtaatggtatattaattaatttattacatattaaagcattgattaaaagaaatgaagtactgattttcgataccgcatcatctaaatctgcaggtaggttaagtctgtttatgtatgatctggaaaataaaatgagaacaaaagttgttcatggtggaatgttaggtgtacatggtcaacattatggttataatactaatatgattaatcaaaattatgaatttaaagctttagaatgtattttagtcaatgtcatggcagtcttagagagtgaattaagaagtcatttagataaacttaataacattttaaaagaattagattcacagattgatcgtgcaaatttgaaagatttattagtttattcaaaagctttaacaatgttttatcaaaaatctcttttaattagaaataccttagatgaattactagataatgatgaagatttagagaacatgtatcttaccgaaaattatgaaattaaaaaattaacatgtgatgatgataaagatagcggagtttcctccataggtaagtctaaaagttctcctgttagtaacaacaacaaaacgaataaccataagaatgtaaatcatacaacaataaatgatgaaccaaatatgattcaacaaggtagtgaagtacgagacacgggagaagttgaaatgttacttgaatcttattataaacagtgtgatgaaattgttcaacaagcagagacaatgattaatgatattaaatcgactgaagatattgttaatattattcttgatgctaatcgtaattcattaatggtatttgaattacgtgttgcgatatttacattaggaatcacaatagctacactactgcctgcattctatggtatgaaccttaaaaattatattgaaaattcaaatattgcatttggaagtgttgttgcattgagtgcaattgcaggtggttcaatgtgtattgtttaccttcgtcgacttcatgcggttaaaagaatgacaatggttagttctaaacaattggataaatttgatgttgacacgaagaaaggtcttcttgaaagcattagaggttctgcaggtaagactggcggaaatagtgatggtaatcgaaagttacaaaaggaagttgtttggaaatggctgattggaaaacatcgttaattttacatgtaaaaaggtacagtaagaggtaaggaatattttactcttgtaaatgtatttatagaactggctaaataatgaaaatataaactcatgacacgatatatacattgtaaataaagcagaagaaaccacaccacgccaaaaagtataattaaagtaataatacagattccaaagacgtgtgtgtattcacgccttaaagaaaattgaatttctttatcttgattaattttatgtttgcagtaattaaagattggtgttcttccctgaagatactgttacagttagttaccccatatattttatattcaattattacttctctcactttatcatactctccacatttaaccatgcagacatcaaggactctttttccaattgatgctaagttactgcagtattattacagctctgttaaagtggagttattgttatctcaagttttgaaaattaaggaaactctgaaaacagaccatgatataatttatgacccacaatctataatgttattatctggtacaatatttaacattaatgataatttctatagaagatcagaactattacaaaattgtcttaaatataatgcatctcaatcaattgatgtaccgcttattttatccccaatatcatttgattcactggaaaatattagtagaaatgcaccaatcggaccatacggaatttcattagataaacaagtcccattaccaaatcgtaagaaagttgtcgatacaattgtattattagaacttttattaataaatgttaataatgttattatgaaaagattcgatgctgcattaaatcaatataataagcaacatgcaacaaatgaaactaaagaaacattatctaaaaaacttgttacattggattttaatgaattagatataatcgaacaattagcttttcatgatatacctattattgatattaaacatcaagaatcaattttaaaattttatctgataaatcaattcagatttttagagatgaaattgtcaatatttcaaaatattgttgataaattaagcacaaatattcgtcaatcaatcacatcaattactaaatctaccaatacctcacaatcttctaatataactccgctgtattcaatgtacctttcattgataagagtggctgatttatatgttgaaattagaaaatcaggtaaatcaatttattttcaaaatattcaatattttactccatacatgagacacaggaaagaattacgtgaaatattaacgcaaatgagcttccattttgcacaatcaaaacaaaatagtatgatattaacactgatttccaaatatgctaaacgatcagaaattaaaaatttatcaatggattcaaatatttttgtctctgaattcaggaaaacttcattagatatgattacattaattagtaaaatgcttgctgttttgaaaagatttcataatgaatggactgaaatttgtgttgaaggtaaatccaatgattttaataaagaatatctgagagagaaattgaaagaaagagcagcaactgaaaaggctaaaagattaagtattatggctgagaatcaaaagcaattgaaagcacaattatcacataaaatgtcttcatcttcaattgtcaataatccatcacaaaataaaaatccatcacaaaataaaaccttacaaagtagttccaggcgagttgcttctatggggcaaattgatgaaaacacaacatcatctccagctgcatcaccaatgacatcaccaacaacggcaactgcatcatctacggtcattcaaagaaaaaacagtttgtcaatgagaagacctgcctctgttattggaactccgggaacagtctcacaaccagcatcaagtttatcttcattaactggctcctctcgttcaccattttatagacctcaaccagcaggaagtacatctgctacagcttcaagatctaattccctaacgagaacggataatgctagaggtttagtcattaagaaaaaatcgatatcagatatggctatgggaaatgatgaattcgatgaatttgcagaacccccaaagattggacaaattcagagaaggtcatcaaatggatcgattactgaatcaccaagtagaacaggtgtaattagatcacctagtattcgaagtacaccaagttctaattcatcaagaacaaattcattaacttcatcccctagtgtgatgagaaatagacaacagatgttacaaagaagagccagtgttaatttatcaagcccttccagtgcaatttctacatctaattctaattcaagctctggctcaaattcaagtcctagagtaactgctgtcaatgcatcaaatgtttcattacaaagaagacgtagtgttattggtacaacaaatctacaaagccaattagagaaagaaagaactgatcatattagagctgctgctctggctagtaaaagtgttggcaattttcatttaactgctcaacaaaggttacaacaacatataatgaaatcttctcaaaaaggtacaatgtatagtaaaccattagagactgtgaaaatgactacaaaatcagaagatgaaaaggagaaagaagaagaagtagagaaggtaagagaaaaagcacaagataaggaatcattaggatcttctgatgttgaagatactatcgttgtaaaggaaacaaagaatgagcatattttagccaatggacatccagaaatcaagtttgaagaaaatattgatgataaattaagtgcagaaattgaaaagctagcattgggtgatgggccagatttgaaaattgttcaaccaacaccaacaaagacaaaagagattgctacagatgatatagttaaggttgaatcattaactgaatttccaagcagtccattaaattctatcaaatcaaaatcattagaagcacaaaatgcactgaaaatacaattggctaatagaagcagatctaattccaatcaaagtccaaatgctaaacaacctaatattaacaataacaaaagaacaatactttccccattgagaaatggtagtaatggggatttatcatcaacaaatgctggatcaataaatggatcaccttctaggagccgaagcaactctgcaactatgaattctgcaaataaaaatggtacgttatcattatcaagtccattaagtagatcaaattcagtatcattatcaaggactggatcaagatcacgatcagcaagtatttcacgtagaaattcagttattgggaatatagttgttgttccagaacatgaagtaagccgaatcaatgaagatcaagaatctagtgtagtgaaaaaggttagatttaccggagttccagagtataccgaagatgaggatgcacaaactccacaacatttccaaaagcaaattaaacaaaaatgggcaggatataaaccattatttaggaaaatcaattcacaagagggtgaagtatttaaacagaatcattttgaaggtcatgaacaagttgtaactgatgattacacttataccccacctccgccacctgtgagacaatataatatggctatgatgcaatctcaacaaccagttccaagaaccactttaagacctcctcctgtggcatctacaggtaatatatccactccaaatgaatccagtggatccaatcgtttatccagattatttagaagacgttagtattcagtgtataatagtaaataggttaagtacattacgtaaaccataataatcataatagtattaggtaataaagattttaaaaaaatttaaatttttttttcttcctctctgcatgtagatgaaaaatttttgaacttgttaacttaaggagagcaacaacttttaaatcagtatattttagtcaggatttagtagcaaagtgggaatgactgaatcagtagttggtacaaaaagaagattttctgaaacaggggatgtggttgaacctgttattattaaaaagaataagacatgaagaagtcactacaagtgaaattgttagtgtaattgataatgatacaggattatcaaaatgtttccatcgtgtacgtgcaaagatgtatctttcccttgctccaatacatttagaacatcctattgaaggtttacgtcaacaacatttagatcctttagtaatgacatataatccaacaattgaaggtgttattatatcatataataatgttaaactatcaaatgaaaatcttaataatgatgaagatagtaaaattgaatataaatatttagcaaaagttgcaaatgagacaccatttacatttctttgggtttatgtagatttcattatttggagaccaaaaattggagattatttagaaggttatagtgttattcaatcacaaagtcatattggtttattaattcatgatgttttcaatgcaagtattaaaaaattttatataccacaagattggtattttgtaccaaatcaagcagatgaaaatgaaatggaaattgataatgaaacttcaaatttaaatgaaaataatgatcaatcatcatcagctacatcattagtaccaaaatcctaataattcttttcaaaaaattagggttattggtgtgatggtaatggagttgcaatagatggtaaaatcaaattcacggtacgtgcattacatgttaatggtaaaggattggcagttgaaggtacattattaactcctggtatggaaaaggatagtcaacctgttgttatggaagataatattaaagataatattaaaaaacatatgaaatttgatgatgatgataataataatgaatcaaagcaatgatgcagttgttgaaaacatagaagaaacagaattaccagaaattcaaccattaactactgatgatgcagttattccatcaatataaagaaagtgatgatagtgatagtgataataataatgataaaggtagtagtagtgatagcgatagtgatagtgatgatgattcaaagagcagtagtgaaaaaagattccgattctgattctgattagattacagagatatattcactttaaattattatattaggaagtaatattaattatatagattttagactgtgtgtatagctagctagtgaaggactagatcaataaagaagtataaattcaaagaagtgtgtaaagtcatggatcatcgatctttcatttaaggcatgtattttgttgtcgctatgaaaacaacatgaaactgtaattttgtactaaaccaaccagttttttctttatcaatggaatgttaacggagatgagtacggtgcccgatatagaagttaggacaacacaattgcttatagagcattttgggtataaacctattagtgttattgatgatataattaatgcaattaatgaaataatgtataaatgtactgaacaacttgaacaaatatttgttgatcaaaaattacaacttgataaagaacgagccagtaagaaatcaaatgatatggaagatgatatcattgtagatgatgttgtagaggaaaaaagttataccattgaagatatacgaattggtacggcaacattggaatctttacttgaacataatattaataagaattttgataaattcgaagtgtatgctttaagaaacgtatttacgttaccagaaaatttaatagaggaaggatatattagattaaggcatcataagttattaaatattgatgatgaaaatgatgggaatcagacagtttcacagatagaatcaaatataaataataaaatagaacgaataactcatggaaattgaataccaacgtgaactacaaaaagttcttacacaaagtttaattaaatttaaaaagatactagctttatcaaagattattcgatggaaattagaaatgttcatgaaaaatgaacaaattgtttcaaatgtaatgccaattaaggatactatattatatttagcaaaacaaacaagagaaacgtgtcagagaatgctttcacaaaaggatgaactaaaggatgaagaacttattgctaaatatggtgtcgatataggtaataatatgggtaaaaacatcgataagataattgaacaaattcgatcagtcgatggaactgttgatattgattcagaaggttatcaatcagtacttgaattactaaaatgatatcattattgataattaataacataatagtcattcatttgtataatataaattgtaatatagtatttattgtaaaattaattgaacaaaaaaaacatattttgattcttatattcgttgagttaatgcatatacagaagataaacaagagatttaaagatatggcttatatacaaagatgtaatatttagatagtcaaataatttaaagactcttcttgatgaagtgaattgcagttgggattgcccaaagaccaactgctaagagggcagctaatttaagggtaagatcagtttgttcttcttgagcttttttcatttgctcttggtagatcatagcatttctgatttcttcttcactgtaaccgttcattgtgtatgtgctggaaaaggatatgaatctaatatgaacagcagtagaatgaaatgaaataataaaattattaagcaattatttcaacacactgtagtagtaatgaaaattgaaattgtccgtcttttcatggatgaaaaaaaacactcagtctcaacgagggcgaagtttattaatataggaggagggtcaattttttacattatagggtggttacagttgttgatatttagcacagtacagcagataatgagtgatattgaacaggagaatgtgcaggacatactgaatgaagaaccagtagtggatggtactactgaaaaggtagagactgacggtgaaactgttgataaaaatgaagataatattgaaaatgaagataatattgatacgggagataacattgatgatgataataataataatgatgatgacaatgaaaaggaaagtgcaaaggataaagaagatcttcaaaatgaactggatgatcttaatggatgataatgcctgggatgagggagaagctaataacaatgatgaggagagacaatccagaaatgctgaagaaccaatagaacaatacacagaagacattgaagatgaacaaacacgtaaaagacgtgaatttgaagaaaagtttaatgcaatattaaagaaaccaacgaaaaagagaaagaataatgatgttgatttagaggcaatgcaagatgaagcaatttcacatttaaaggggttaatgaaggaagcagcatatttagatattgatgcagttaataataagaaaccagcaattaataaattaaaattattaccacaagtaaaggatacattattgaaatctaatttatatgattcaattctagataacaatttattagaagctgtaaggatttggttagaaccgttacctgatgcgtcattaccatcatttgaaattcaaaaagctttattgaatgaattagttaagatgccaattaaaactatccatttgagagaatcaggattaggtaaagtaatggtcttttaccaaaaatcaaagaaagttgataactcattaaagagaattgcagaaaaattaattggagattggactagaccagttatgggtagaagtgataattatagggcaagagatgttccaactgcaacatttgatattgagaaatttaataagagaacaaaattacaatcaagtattgataatagtgataaaaagaatgtacgtaaatcactatatcaagaaagtgcagatagaagaaagagagcagcagcaccagaagctagaacttctgtttatacaattgcaccacaatccaatttacaagcattacaatcacaacataatagtgttttatcaatgggtattggatcatcaattaatagggatgaaagatttaaggcaattaatcgtaaattaacaaaactgtcacaaaagaagaagaatgttaaaaaggatggtgtctctattgaaggtagaggactcaatatataggttttttgactagtattcttgtatattgaactgaataattaattaactagtaatgattacagtagtaaatttaatttttgaaagtaatttatgatttataatacgataaaacgatatttttttttaatatttcatatatttattaaattagtaaaagtttgagatataaacatagataataaattatttttatttccttttgtaataagatattcaaaatggagtaaacacaattatgatcttggcttttccttcttttctttccataaagctaataaagagacaccagaaactttaacaaccttgaatctaacacctggaatatcacccttagccttacctcttctaccgaaacctgctaataaaacttcatcattttcatcaacatagttaagacaaccatcatttggaacgaaagcagtaactctcttaccgtttttgattaattgaactctgacacactttctaatagcagagtttggttgctttgattcaataccaattttttctaaaacaataccttttgcatgggaagaaccaccaaatggtgaatatttgaaagcagtacctaaaagtcttgctttataagattgatcagaccatttgttatctcttctgtgaactctcaactttcttgcggagtttaatcctcttggcttacccttacccatattgagatagtttgttagttgaataaatgaaagaaagatataacaataattaaaaaattaaatgaaaatccaagatgaaaataattcactaataaaaatcaactaacattaaaaaaagtggtatagtattaagtgagagtaagttcttgaaaggtagagagtgacggtctttttcgcaatgggcggacagggggagtgattccccttgattttggtgggtagatttcccctcgctttttggctatgaaaaaattatcttttcttttctatttttctattcattaccgttttgggacatttttttgtttttttctaatgacgcactggttatgtgtgcggtgtaaaggggtattgtggagggttttgtttgtagacttgacctgtattgtgtcacgtgcaggtggaggcttggtaaagttattcttatatcaacttacaatactttaagtaacatgacttatccccataattgatcccttatttttgtcaattaaacaatggaaaaacatgctaatgccctggtggcacactacttacgctctcacggatacacaaacacattatctgcctttgaacaagaattaggtgtacgttttaacccaaataaacctttagataacgatgaatcattagatgcaattcttgctgatagaattaactatttagaatctaataattctagcaatgctgttgattataaagatgaagatgaagttaataaacttgatacaattgttcattctgaactgattaaatctaaaaagattgaattacctcactggtctattactattccaaatgttcatcaaactttaaatcttggaacattatctgcattaatcatttcatcatcatattttaatgcaataatcaatgataaggcatataatttggcaattttcctaacaaatacaaaatatttatttattattgatctcgatactaatcaaatcgtactttctaaatttgatgtctttggtaatggtcaacaaattaaaactgtcattggaattcatggtacttctcatattgtattatgtgatatgaatggtaatattgcatcaacttctttattacctgataattcatcggatactttacaattcattcttagtttagttacttcacctcttaaattacatagaagattgataactgatttcaaattcttatcatttaatgatgctatgaaccctaaattaattggttattttgcatcaattggctgggatagtcgtataactgttggtagagttttacaaaatattgatgatgagaactctatcgattttgaaataataggtgattataaactatttactaatccaacatgtcttttaattttacaagatactaaaacaaatctaccaatagttatagtgggaaggttggattcttcattattaacattattcactataacatcacataatgattctaaattggttgaattggcaaaattatcacttaatgactctgagttttcaagtcattcattccaaccaatggctattactgaaatttcaaatgtttcatcactgaataatgataagataatcacagttggtacagatcatataccttatatgcgattaattacactagtagttccatcaatacatgaaattataaaacctgaagatgataaagaggaaattttatttagtgaattaacaaaactatatgaatataataaagaaaacacagaatctttccaatcaaatacacaaatattacgttcttatatattttctaattttaactcattatcaccacaagacaaatattctaatgctattttactctcacgtccaaattgttcaggtgtttggatacctggagatgatggtaaattacgtggatttgatttaagatcaggtacagttttcgaaactcttgattctaatgatggacgtgcaaagtctgcatttattggtagatatggtcttaattcacaatttgaagtaatggcagtatgtggtgcagttgataaaaagataagtatttggaaatgtaatacttaatctattatattagtatattaattctacttaactttataaatgactatccctaaaatacaacttcctcaggtaagacatgcattttccttccattatctctaacagtttcatttttggtatctcgttttaaacttattctcatatcgtatgcatcaatatcatcgtttacctttttaatatccgttggtggtgtagcccctgtttcataatatccaataacccgtcgaaatacactataacctaatttttcatacattgtaattgcagttttattagaacatttaacgaataaatcaataaaccatgcatttattggtctctctggttcaacgacaattttcaattgttcacataaatatgaacctaaactaactctacgataatttggatcaactgttactgcagatatatgtgcatgccattctttaccttgaccttcagtcttggctaacatataacctgttggttcatgattttcattgactgatttatatgataatgtaggccatgtgtacagatattgatggtaaaagtataaataaaagttttctgttaatggatcaagattgattggtgtaaaattgaaaaggtcagtggcctggaatggtttaattgacgacattgtcttatataaaaaattgttattaaaaatcgatatataaataatacacaatcatgaataaaaacatggaaaacatgttacgggaaaaatatcagaatttcatgttctttttttttcaacacttttcataagtttatctatcttttccttttccaatgtctgaaagtacccatctctcctatcaatacgtctctcaagggtgcccatacatcccttgatatcataataatatttgtgtcgacgttcctttggaatttcatctatacaatcctgtaaaatatcaataatacctaacacaaccttatctgcatgtactataaatggatccattaatatggtaattaatgtatagatgatttgtttgcataaaactattgcaaaaccatcacattctttaatgaaatctttcaaaatgctgagtattattaatgtcaattccacgtaatctttacatttactcaatgatggaagtaatgtatcatttagtaaaccgcctaatcttgtgtatctttctaattcatttggtattgctaatttatataatcgaaaggttgtttcataggtaagtggtaatataagtcgacttttccattcaggtgttaatgatggtaatgcaagtaataatgcttgcattgcattggtaaataatggcattgtttgagattttaaaattatattattctttatctttccactggataacaatgatttgaatatttcgtttaatgaattacatgcttctcttttcacccctagatcagcatcatctaaaaaagttaataaaaatggtagaatatatctccaatttgattcaatatctgcattttctatcaaaatgttaattaatcccatcctagttacatgttgaagcttaaatgaatccatttgatctaatactttactgtaattttgtcctaataatttctgattgattgcaagtcttgtttgttgtctgtatcctgaaatattgacattattggacaatccgagttgtttaatttcattcaaaactgtgacaacatcagagataattgtctctattactttactctggtcaatttgtataagtttgttgacgatttccttggaatattggcaacttttctctgaagcccaaggcacacatgattctttgttataataaaaccttccacaaaaggataatattcgattaaaatgtctcccatctgataaaaactctatatcaattgaattcaactgttgtaatttcagttcacattcaagtgatatgtcattttgagattttcttgtctcatggtccactaactgatcactttcagcaaaccaaacccaacttctcttcaagctctcctcaatagtattcaaagcatcccaatccatcccatcattgatcatatcttgtcctgtatatatcccaacatgaacatgcaaagacatgtataacaaacaccaaagctcggaaatttcaacaattttccgatgtccctctgttactcgtcatttttttccagtgaaacacttctcttacacaaattttattttattctattttattctatattttactctacttttcgttgtttatcttttaattgtaatctattgtattttatatatcctattggattgtttcagttactgataaactagtggcgtaaacaccccctttggattaattttatttcatttcaagatattgaaacaattttaaaaatgattggtaaaagggtgcgttcacaatccttcgaagacaatgaaattaataatgacaacagatctagctcagttgtttcaaaaatagctaaaataaaagatagtatattttcaatctttggacagaaaaataaccaacaaaactatcctattcaacaacaacaacaacaacagcaacaacatgttaatagacctagttcactacctaaatctagtgatgtaattcctgatagacaatcaactcccgtatttgctcctggtgatgatttttcatttcaatattccaatggtccaattactgctagacaattggaagcttattataataccttgaaaaaggaaaatgaatttttatctaatagtatgaatgactcaattgcaaacaattcggtaatagaaaataatgcagaatcaacaaatattgtggatgatgaaaattcattgaataaaagtgataagaatagtgttgctaatgaaaatgataatgcaattgttgtatttaataatgatgaaaatttaaattcaaatataagttcaaattcaaatatagatgatttaatgattatagatgatgctgaaaaattaggattaacaccattattttcacaaactgatccacttgagcgtgctaatcttgttcaattgaagaaaatgatggaattggaaaaatatagaagatatcgtttaagttatatcaaaaagcatactagtcatataaacaattcaagtgctaaaaaagttggtaaaagtgtcaacgataaattaaaatattccaaatataataaaaaggtgggcttcaaaaatttaccagctgatagaagaaataaatcaggagttttcggtataagtttattagatacagttcctgatgatactgatgatgtaaaggttgatgaaaaagttgatgatattgtcaaaccagttgattcaaatccagtaagtaaattaagatttaatgataattctaaaacagcaacttttgagctttcttccaaaacaagaagtttcattccaaaaccagaaacagaaaaagaaagtccattaaagaaagatttaccaaaggaagaaattaaaattccaacaaaaacaagtatatcatcaaacctaactaaagttgcagaacctgctgcaattccttcaagcggattcaaatttgaagctgctaaacctgatgttaagaagtctgaagaaaaaaaacctacctcatcattttcatttggtttctcaaaacctactgaaccatctgcttccaaatcagacactacttctactactccatcattttcatttggacagcaaaaagaagaaactgacaaacctgctacaactacaccatcgtttagttttggacaatccaaatcagtaccttctaaacctttatttggtgctaaatcatccttaattgaagaagttgttgatgcagatgctctgaatgatccaagcatggatgttaaatctaaggcattacaaccatctgggttcaaatttggtgtttcaacagataaaccatcatctgaaactttaacaggaacaaaacttcctgcattatttggtacaactaaaccttcagatttaactacaaatgctgataccaaaccaaccactccttcattttcatttggtaaaatggaatcaactaaacctacatcatctttcagctttggtaataacgcaactgctgataaattcaactgtaccaaaaacaaacttgccatcgtttggtgtgtctaatacagataaaaaggaatccgaaaaggatgataaagtacctacttttggtactaataaagaaagtagtagtttttctttcggtggttttggttcaaccgatagtgctgctaaacctcaaattgctgaaaaaaccgaaggtactactatgccaacacttaattttggtgataattcgaaaccctcaactacattcaaaccagctgaagctccaaagcctacatcttttagctttggtaatacaacagctacagaaaccatgactaaatcggaggaaaagaaggctactcctgcatttaattttggtataggttcagcaaattctactaaaccagaagaaaataaaatctcaggtattacgtttggtcaatcagctactactaattcaacaacaaaaccagaagaaaacaaaatttcaggtattacatttggtcaatcaactagtactaatttaacaaccaaaccagaggaaactaaatccaccccatcttttagttttggaaatgcttcaactccttccactgctgtaaaaccagtcagttttggttttggtagttcttccactcctggagctaccaaacctgcagagtcaaaaccagcttcaaacttcaattttggtgcaaatactcctgtctcatctctcaattttggtatgaaaacagataaaccgaaggatgacgccgatactattgaaccatctgcaaaaagaaataacaccgcttttggctttggaggtgcaaaatcaactgccacaactacacttccaggtttcaacaatattgctaatggtgcaaccaatggttctacatttaattttgcttcaaataagccaagtacaacacagattaatggtgctttgagtgcaaatgcaaacaatgctaatggtggtactccatcaagttttaactttggttccggttcaaatacttcatcaacaactaatatgtttggtcaatctaaaccattaggttctggttctcaacctaacaatgtacctgcaacatcgaccactccaggtaaaatgttctcttttaatacaacagcttttcctccactagctgctgcaccaaatgctggattatctcaatcacaatctcctgttggtacttctgggtttaattttggtgctacaaacaataattcaaatattgtcaatacaggatttggtgctactccaaatggctttggtggtatgaataattcaaatagtaacggtaacatgtttggtggtatcaatacagctaataataatatgtttggaaacaatagtaacggaaatggcatgaacaatgcatctacaacttttaattttggtggagctagtatgccaaactcacaaagcaccacacgttccggtactcctaatattaacttttcaggtcaagcaatcgcaaatgttgatccatcaacgatatttggtcaacaacaagcaactcctgaacaaatgctcaatagaccaagagctgttccacgtcgtcgtcgacaacgttaaggttatatgttcagatttgtaacagaactttgtatctaattatatataatatgtacagtgtatattaattttactccgacaatactttgatactataacattgaatggttatacaagataaacgtgtcattacatgaaaattatcaactgaaagttaaaattttgaaattgcatcacttctacaatataagttcgagaactttcggtggcgttttaatgctatttcttcaacttttaacttcaacttttatctttaacttttaacttcttctttcttcaacaatacaactgaaaatggctccaattgcaccagaaggtatgtatattacacaattgacttgaatgaagaagtaaatactaacaattcattaaattttatagtcctatgggcacaaagatcaaatgttagtgataaatcaaagaatattatctatcttacaatcaatgttaaagatcccgaacaatctactttagtatttgatatttccgatacttcattagatttaaaagcgaaaagtacaactactgaagaagaatatgacttacacattgatttcttcaaagaaattgatgcatcatctgtacgtcaaaccatcacaggttctcatattttcgttgttttagaaaagaaagatttagaagaagaatactggccacgtttaaccaaggataaaattaaatacagaaatattcgtactgattttgatagatgggttgatgaagatgaacaagatgaagttgaagctgaagatttaagtggtatgggcggtatggctgatatggcaggtatgggtggcatgggtggcatgggtgatatggcaggtcttggtggtatgggtggtatgggtgattttgatatctctcaattagctaaacaatttggtggtgctggtgctccaaactttggttccagtggtccaagtcagtatggtgatttctcaggtgctgatgaaaatgactttagttccagtggtaacgaagatgatgaagaagatgatgatgaaggacatgaacatggacacagtcatagtcatggtgatgaaggacattctcacagtcactaatttactcttgaatataaataagtttttgtaattcaagtgtttatgtacaaaatatagtttgttaaacttaaaccgtttactcaaatagtaagattaaattagaaaagatctcgttcaagtattattttttttattttcgtagtttacaaagttgagagtttcctattaagaagagtaacttctgctatcaaatcattaagttcatttactgattcaatcgatgaacttccagagtttaatttaagtttttcaagttcctcaatatagttttgtgtaactctttgttcaattaaaatcttatctgtttctgtttctgtaacatctctcataccaaactcatagatactccataatccaaacaatgcaactgcagtacaaacagccagagcaatatagcctttaagagtgaatccttctggtaatggttctggctgtttgttctcacctctcaaatttaagaaatcatgatgattaccggctgcattacctttgtatgaaacactggatctcttacacatatcgatttgctcttctggtaatgttatatcaatcaaatctggagcttcaatcaaagtaactgccaaaccttgttcaagatggaaatctaaatggcagtggaaaaaccaaacacctgggttattagctgtgaatctcaatacaagatatccattaccttcaacaagcacagtatctctcattgttgggaattccggaagtttcaaatttggatcatctgggttataatgaacaggttcttcaaagctttctgatcttgaaacaacttggaattgatgaccgtgcatgtgcattggatgtttattgtcatcttcattgttaactacaatttcaataacctcacctgcatttaaaacaaaactgttggtgttggaaccatatattcttgcatcttttttgagagcttgtggagcacttaaaactgttaataaagttggtacctttggtgcaacatatgtgttattattaaaaaatgcgtaattaacaccatcacctaaattttccatatgcaatacaagttcaattctataatctggatcagttaaaaggggacgaggaacatatggaataagagttaaatcatcaagaggttcaaagtcatctggttcgttgacccatttcggcatttctggtaatgggagcttttcatcatatttcatataatttattgaattcaattctaagtcatcaggtacaacatcaagcattgaactatcgattgaagtaataatagcaatattagaagtagcatcttcctttgatttagttcttaaaagaatactagctctttgacctacagttaaatatatcatttctgtagtttgaggttttgtgtagacaccatcgatttcaataacatcaaattcatatccaggaattgaaaaatactgtgataccatgataccgatattagctattctaattaaatatgttgtatcataatcaatattaacagtgacatttcttgaatcattgaaaagaatattctgtggtacaggttctgcaccagttggattatatctagtcaattgtctctcaactaaagcagaactaggtaagtggtaccaatcactaatactccaaaataattcatgatcaaatttatagttattttccttttcagcatcatgaacaataaacagacctctgagaccatcactatactgagagccactatgactatgataccaaaaagttcctgactgttcaacgataaaatcatacaccattgaatcacccgcacttatcgggcattgggtcacaccaacggggccatccatgtgattaacacctttcatcttcaaaccatgaaaatgtaatgaagtagttgcatcttcaagtccattaatcaaatgtaaccgtatcctgtctccaacatcaacttcaattgtaggtaatggccaacttccattaaaagaaataacttgtctttccataacgccatcaggattggcatttatatattctactctatagtaaagatcatgtattttagcagcagatgtatctgcaaataccacgcttagtaacgtgtaaaatatccaaatagatggtactgataaatggaatatcatgtttgcttagaaagaagtgataacaaagggatgtatacaaatcaagtataccaagaaagatcatgatgcatcaacttaaaacaggctgaagaaaaaacgaaaaatttctgagcaaatccgagaagaataaaaaagccctgtcaaatctttcaagataagcttatcctcatcaaaggatgtcggaacaattacacttaaaagaatcattacattgatcgagttatatgtgcagtatcaaaagtataaagatgtggttatatataaaatgtggtactttatgtttttaaattatataagaggaaagttaaaattaggagtaataaatagatagatatatgaattaaacttaaatttcaaacttaacgagttgccatagccttggtaacgactctctttaaagctaattcagcctttcttaagtcatcagcagatgaatcttcaatttctaatgcagctaaagcatcagataaagcagcttcaatcttagcctttgaacccttcttgatctttgcagataagactggatcagtaacggtaccttcaatagaagtaacgtaagcttctaatttttgcttagcttcgtgtttcttggagaattcttcatcagccttcttgaatttatcagcatcatcaatcatcttttgaatatcatcgttagataatctaccaattgagttggagatagtaatgttagcagatttaccagtagatttttcaacagcagtaacctttaagataccattagcatcaatttcaaaaattgcttctaagactggttcaccagctggcattggtggaacaccctttaagtcgaattcacctaataaagtgttttcagtacagttaactctttcaccttggtagactgggaattgaacagtagtttggtggtctgcaacagttgtgaaagttcttctcttaatagttggaacagtagtgtttcttggaacaactggagcgaaaacattaccttgcatagcaacacctaaagataatggaataacatctaataataataaatctttagtttcatcagaagtagattgaccggttaagatagcaccttgaacagcagcaccgaaagcaacagcttcatctgggttaatagatttttctaattgtttaccatcaaagaagtcagataacatcttttggacctttggaattctggtagaaccaccaacaaggacaacttcatcaatcttttctttacctaaacctgaatcctttaagacttgttcaactggggttaaagtagatttgaataaagcagagtttaagtcttcgaatcttgctctggtaatgttagcagagaaatcttcaccttcaaataaggaatcgacttcaacggtagtttgagcaactgaagataaggttctctttgctctttcacaagcagttcttaatcttcttaaagctcttgcatcgttagagatatctaaaccagtcttcttttggaattctttcttgaagtgttctaataagttagtatcgaaatcttgaccacctaaatgagtatcacctgaagttgccttaacagtgaaaacaccacctgcaatatgtaataaagagacatcgaaagtacctccacctaaatcgaaaattaaaatgtgtttttcgtgttcggatttacctgcacctaaaccgtaagcaattgcagcagcggttggttcgttaataattcttaaaacatctaaacctgcaatggaacctgcatccttagttgcttgtctttgggaatcattgaaataagctggaacggtaacaacagccttatcaacagcttgacctaatttagcttctgcaatttccttcattttagttaaaaccatggaagaaatttcttgtggggagaaaaccttggtttcttctaagtaagaaacttcaatctttgggttaccattatcatcgataaccttgaatggccaggtcttgatatctttttgaacagattcttcactgaaagctctaccaattaatctctttgcatcgaaaacggtgttggttgggtttaaagcagcttgattctttgcagcatcaccaattaatctttcttctggagtgaaagcaacgaaagatggggtaactctgttaccttgttcatttgcaataatttcaacaccagtagtgttatcgtaaacagcgacacaagaataggtagtacctaaatcaataccaattgcaccagcgaaagtaccttcagacattatttctgttgttagttgaaagagctaaaccaaaagtgaaaagaaagttataatacattttaattcaatttcattaaattttttctagtattaacaaaattctaagcaacaacccctagtggaaaatttttatagaacccacctgaaaaaaaaaaaaatattagtatgagtggtgcggggagtgagttggtgagagataattttttcttataggagattgcccttttgggaaaccgtagaagcgggtaacttttcagattatgataaaatttatttaaacagtattcttactgcgccattctgctatttgaacttctaatagttgctgcgccacctcaacttcctttatttgaccccttatacgtatactctgcattgaatgcatttcaggtgatttattatctgacatgattttaatttgagcgcatgtttgacgacgtaattgttcaatagtcttaccctgacgtccaataagatgagatacagcaccagaaggtacaataataaaccgttgagaagattgagccgcctctctctcagaaattaatttttttgctaataaagagggctcagcgggtaaaataatttcaattttctccccttgttcaatttcttgcccttcaaattttccccattgaggagaatgaaggcacattactgttattggagggctcagctcttcaatggtggcaaaacattcaagaaacattgtaataaagggattttcgattgaataaaattgtaattctgaaatgttgtttataatatgaattttaccaggtaatagatgatgcagtggtatcgcagattcattctcttctactggtattacctgttctatgagtttattaccatggttaaaagctatttttatctgctctaacaatgatttttttcttatatgattgatgtaaacaattataatccatcttttcacagtgcgggcaacttctttcacgatgacgtgattgctgtaaccagtgcttttcttaagatggtttaatttgtcacagatttcaccactttgtgtagagagtattacaatctcgtccattttctttgagtttctcaaaagaaaatacaccatttactagtactttcaaatacagcaaagcattaatatacttttcaaaactatacaaaatgctgagccttctaaataattttaagttttcagtaggatatcctaatcgggaaacttttacgataacaaaatcaaaattactcaataaggaaactggcgcaaaaaaattcaaatattctttgttaaataatccaccttattgatgaatcattaaatttgcacaattttttcaatctatgtgtatctaatgaaaatcttttttaaaaataaagcaaagtacagtcagcttatatacttaataattctttttaatactaaatgttttaattaatcgaccttcttctaataaactgcaatcatgtcaaatgttaaattaggtagtattatttactcctcagtcatgccaatgattagaatgtatttgattataggaacaggttttttcgttacacgtaaaggttattttggtgtaactgcagctagagccttctctgatatggttatgatgattttcctaccagctttggttttcgataaaattgtttcctacatttcaattgatgatattaaaacaattggtgttatttgcttttgtgcttttataatgtattctattaatgcatgtatggcaacccttcttgttcttttcactccagttccaaaaactcctaaagatagatgggttggtggtgctattttagctggtattatgcaaaatgtctcagatataccaatctcctatatacaagcaattactttattcacattagatcaacaaaataaaggtacagcttatgttattatatggttggcaatgtatgttgtagttcaatttaattgtggacttttcaaattggttgattgggattttgaatatagggacaaaaattacatcgagcctgtcggtttggagaaactagatattactccttcagtgactgatttagaaagaactccaacattggaaaaaactcttgatgagaataaacttcaaattttagatacagcttcagaaaatcctatctcacaaataacttcaatctcatcggagtatgaaaatgagtcagatgctggacctaacccaattttaaataaaaatatagccgttgattcattgatgcctttgaaattggttaccactttaaactctggattatccaaaataaaatcttcaacagctgctatttctaaaataccatcttctagaaatgctgataataacctaaatatcaacaactcagaaatattattaagtcaagaacttgtcaaagaatattccaactaccaaccatataatcaaaatatgtcaaaaatcatgaaaatagtaacagagtctaatctcacagcaaaagatgttgacaactcaggtgaaaaaataccttttataaagaaatataagttacactacatcatattctttttagaaaatatgttgaaacccaattccattgttttaataatagcactaacaattgcactgataccatggttaaaagcattatttacaaataatggaacaattcaattacccaatgcaccaaatgaagaacctgcactaaactttattcttctttatgctgagtatttaggatatccttgtgtcccaatggggttacttttaataggttcagttttagcaagattagaattttctcaagtccctaaaggattttggaaaactgctgtatgtcatacagttttcagattaggtgttttacctataattggcactgtatttatatcagcgctaaagagaattggctggttaagtgatccaatggcaatttttgcaagtacaattgagttttgtttacctagtgcaacagttcaaatttatttaactgctgctgcaatgaaaccaactgataaaacatgtactccattaaactgtgttggtctttatatgattatgcaatataccagtttaattgttgctgttccaataactgtttgttattgtattaaaaatgttatagatttatagagtatgtacctggcaaaagtattaatgggtgtatcaattaaatatatcaaacgttctttcagcaatatgtattaactgaatcagatatatgttttcgataatttcaacaacttctttttcaatagttgattaaagtaaaagaaattgttcttatcagtgggaaaaaatcatttaacaatagcattccatgtatttaataagaaaaattatataagatcattgagaatggattatgtcaaaatttctgaggctgacaactacttaaactttgaggtatcaaggctttaaccgtgtggttttaacttatttgtatattacttgatttgtagtctatctttccaaacagctaaccaataatctctcaatttgccttctaattttgaattttgttattttattctaacaaaaccaagccgatttactgatacatcacaattcgattatacattgattataacgaatttatctgaatcgacacaaacattattcaaaagtgacgaaactttcttggttaaaatacatcccttctaggggatctagtaaaggtttagtgaagaaatttataaataagttcataaagagaaatagtagtaaagatatagttttcttttacttattaaacaaggaagaacaacaaaagcattttaaaagagttcttgatagttattaccaaaaaagacaaaagaatcatcacaatttcaataaaattagtggtaatatgaacagagattctgccgagccttatggatcaaggaatgatgacagtatgtcatcatttatattcaataaaattgcaggagcttataaaacaacaaaggaatcaacttatgtcagatccatttataatgaaacttcatctgcatttaataaaatagatgctggttattcaacaaataataattctgaatctatggtaaaattaccacagaacacacaaataacgttatatccaaactattgtaaacatgaaaacggtgagtatgttacacgtgttaaggggattgtttatgtgacaggaattatgtcaagaaaaaacaaatttttgtttagtatggcaagaaggatagtcaaatcaaatgataatgaaaatgatttagattcagatcaaatagaaaatgaaatgaaagatgcaattgtaaatcaagatagaatctcaaatttaaaagatgatgatgattcaacttctatgtcaatgactgctatgcctgatgatacggtcacttccagaatggaaggaatattagctaaaaatatatcaggaacaccattgaatgttacaattggctctgatgagccagttgatcaattagttggagctacattaacaactgataattttgggatatttcaaatgtcattggtgacatcatataaaccaagttatgttgctgtatcttccgtgattgatacttcagtattacagacaacaacagtggaaattgttgagtcaagtggtgtcagtgttattactgatatagatgatactatacgtaaaacgggagttttaggtgataaaagagaagttttccgtaacattttttcaaaaccatacacgagttgtgaagttgatggaattgcagattggtatagacaattacatgaagaattcaattgtcctgttcattatgtttcaaattccccatggcaaatttttaatgttgtttatgggttcatgacttactttaactttccaattacatctattcatttacgtcagtatagtggcaatttagtttcttcatttacacaaccaagtgcagaacgtaaaagatcatcacttgttgcattatttaatgagttcccaaatagaaaatttattttagttggagatactggtgaacaggatttagaggcttatttatcattaataccacattatcctaatcaaattttagcaatttatctaagagttgttcctacatctttatgtttaaatggtgatgataaggcagcattgaaagaattgaataaaatgttaagatcaagaaataatagaaataatgacgatgacaaatataataaaattctaaagaatccaacaggaattgattcggatgattctgatgatgatagaatgtatcataatttaagaaatactgaacctgaagatataggacgttccagacgtagatcaagtttagatgctgctagaagtactatagcatccgctgttaatctaactagagaggttaatagaaagttgccaccaattgtgcctcgtaaacctgactctttaagagggagagaattgttgaacagtcaggctgaaaaagtagaagttatgaatgtaataaataataagatacgtaagggaaaggtcgaaccaagggatgatttacaatttgatgatttaatggagaataagtatgatgctaattatataggtaacaatacatatggagaagttaagagtgatattgtggacaaaagatttattgcatggaaagcaagggtacgacgtataattgatgaagttcctgaaggtgttcaattcaaattttgggaagatgttaatgctgtgaagaaggattgtatagatattataataaaagagctaaagtaatgtaatagttatatatttaatgtttattttattattactaaaagattaaaatagtaaatgttcttataaaattgataattaaagtctttgttaattaattttgtaaagaatggatacatctatattacagttggctcataaattactcaattgtgtatgagtgatcagattcaatttgacttcagcaaaagaatccacactcttttgagtctaatgaatggagttgaagtagcaatctttaaaatgatatttaaatacattcattttaccgtttaatctaccctatttgcttcagcaaaagcacctgtaccgtcaccgtaatctttaacctttggttcattttcatcaacaatttcatcaatagcactcttaaattgagacatatcgatttctgtaccatggtcagcagataattcttcttctctgagaaacttatcttcaaatcttttcaacactatttcacgacctgtaagtttattcttttcacttgatttagcgtttaatctttgtaatctatgttctttcttccatttagcaaaagtttctgaattaattggagtcaaattagtctttggtaacttatctctttcagtttcaataaagtcttcaagtgttatctttggttgattttcaagagccattttttcaagtctacgttgttcctttgtcttcaatacaaaaccttgtggaagagaatgtctatatttacattcaattttattttttgtatcagtatttggacaaacccagaaccaaccatacttagcatcttcaacagcttgaataaaatatttacaaactttatcggttgtagttcttgcattaccttgcttagataaaataactttacgaagtttttcttcatcccaattatccattgtatcatttgctttttcatcagattcatccttttcatcggtatataaatctcttttagctgattttctagcaacattcaaatcatgactaaatttacaatttttacctcttgtacaggtaccaagtttgaaaaattcacataaaatactctttggatcgacaccgaatggaactttttgaacaccaattgaaccttgaagtaacttaagtgcttcctttttagcttcttcagcagctttcttttctgctgcacgacgtttagccatttcttgttgttttttcaagtcagatggtgcattagtttgaacttgactgatatattcttgaactttcttcgatttattcttatttctcaaaccaaaagtacgatcttcagcatttttagccttagcctttgctttaagcttcttttcagcttctttctgttgatttttagtgttcttctttggaggcatcttttcaactctataattagattgctaagtggtatattatttgaaccaaacagaagtaaaagaagcttgaattcaggaagtgaaaaattccatcaatgatgttcaatgaacttgaaatttttttattttttttctcggaaatttagagaaggtggaaatttgcaaatgatattcaaaaattgtaagtagtaagtattaaatctgatgattgaggagggagttatattggatcattattatctttggggaggtgaataattgacatatctttgattctgttttaactcttttagatatattcactattggtataattgtatataatctattatatagggaatggtggtatttgttaataatcaaagtaccgctgttgttttgaataaacagaaagcaattgtatcgggcaaaaacagcacacatttcacaagatcattacattcacaacttagaccaagatatatcaagatgcgtagtgaatttagaattgcattaatatccggattggttttaggagcttcatattatgcaatgtcacataatggtattagattagatactaataatggttcaaatgcaggtatttcaacaattagttcaggttcttcaactactttcccaactttagattcaaataaagttggtaatagtgtaatcagtcaaaatttcttttcaactactacaactactaattcattaaataatggtggtgcatctcaacaacaaaataaacaaggaatcccagttttcacagatgaggaagttaataaaagattgaaaaaatatgaagaaagttatatagttaatagaggtaagggtgtttatagatatgatatttctcaattaccaagtaataatccaattgaagatgatagagcagaaaaaattatgcaagttccaatacaagatgtctataataataatgaaaaagttgaaactgattggcatttttggtcagttttcgatggacatgcaggttggaatacatctgcatatttaagagataaattaatagattctgttgttggtgaactgaatagtgtttataaaatcagtgagaagaatttacgtttaattccatcaaatgaagtaattgataaagcaattaaacaaggatttgttaaattagatgatgaaattgttcataaaaatgttcaaaaattacttgattcaccaaataagaatgcagcagcagaattattaatgcctgcattatcaggttcatgtgcattaatgtcattttatgatacacatagtaaaattttaaaagttgcagttacaggtgattcacgtgcattattaggatcttttaatgatgaaaataataaatggacagttgaagcattatcaattgatcaaacaggttcaaatccaactgaagttgcaaaactgttaagtgaacatccaaatgaaccaaatgttgttcgtaatggacgtgttttaggttcattagaaccatcaagagcatttggtgatgcaagatataaatgggcaaaggaaatgcaagcaaaggtttataatcaattttttggacgtcaatcacctgcaaatttgaaaactccaccatatgttacagctgaaccaataattacaacgcatgaagttaatccatctaaaaatgattttatggttatggcaagtgatggattatatgaaatgttatcaaatgaggaaattgttggattagttgttaaatggatggaaaataagaaaatgattaaaccaaataaaaatttatttagttcagtatggcaaagatcaaaggataaaaatttacctgaagttattgatatatcagataaatcaggtaaaccaaagcaaagatatagaagatcagataatatgtcaggttatatacttgaagatgaaaatgtttcaactcatttaatacgtaatgcattaagtaatggaggtcataaggaagatgttaatcttttagtaagtattccatatccattaagtagaagatatagagatgatttaactgttactgttgttttctttgatgatcatattaaacatacagaaaatgcaactggtatgttacaagttaatagagctgcaactcagggtggattagatgaaaatttgaaatctaagttatgattttttatattgtataataatattatagtattaaataagttaaagataacaggatatatataatagtagcatttcaataaaatatttcacatatacatgtaactatacaaagagataaatttaaaaaattagatatacgtatattattatgattatgataattatatcacaggaagaaggtattattatagataagaaggatttcaaatataacgtttataatgaaacatttaggtgataagaaaagaaaacaagaaaactggaaatttaaaacggaaaattgaaaattgaatatagtattttaacaagcacaaccattatcgttgatattattttgagatggagctgttaaatcaattctattattattttgagtttgagcaactggattttcatcaggttttgcattatccattttttcaagaatagtttcagcaatattcatgaaaacttcattaacattataagatgtctttgcagaagtttcaaagaaaactgcaccttcttcatcggctaattgtttgccctcttcaattgaaactttccttgcaccatcaatttcttcacctgaagtttcatccattattaaatcatatttatttcctattagggcaatagtaatatttttagttgattgttcctttaattctttcatccaatgtcttgcctttataaaactagcaggttttgtaacatcataaactaccaaagcagcttgagcatttctataatataaatgagctaaatttgcaaatctttcttgacctgcagtatcccatatttcaaatttaatagttctatcatttacagtacatttttgagttaaaaatgcagctccgattgttggttccttattttcttggaaatcatttgatacaaatctaagtactaatgatgatttaccaacagcggcttcacctagaagtaccaatttaatcgaagtttgattagatgctgacattacttatctaatatatttgataatataaggagtataatatgttaaaccagtttaaaaataaactcaaaagcaagatacaattaaattaagataaattaagataagataaaaataaaaataaaataaaattaagtaaaactgtctcaagtgtgcatccgggctaagacaaattataaaatcccttgcaatgacctaatatttctcaatttcgcaaatttggtggcttttttcggatttttcaaattttttgaattttgcgagggattttgacgtgggtttcgcaattttcgcaatttctataagataagtttcatcatgaattcattgacctggcttatttaggaaactattgatgttattcttcagtttaatagatgatactttggtatatgttacacgtattgtaatgtatgctagatataccggagtatgtatataacattcacaatgtcttgaatatgtatcatatctatttcatatttatttcactataatatccctttaattaatcaatcaatagatcaatagatcaattggaaatcatgactacagctaataatgttcctcagatttattctttaccattagctcatccttattcatttaaacagagaagttatcaagttttaaaactttcaaatggtattcatggtttgattattactgatccaactgaagatttagcaacttgttgtttatcaattgccgctggtcatcattcaaatccaaatgaaattccaggtttagctcatttatgtgaacatatgattactttaagttctaaaaattattcaactccagaattatataaaaaattagttcacgatgctggtggtactttaaatgctttaactagtaatgaaatttcaagtttccattttagtatcccaattactccatcaaagaatactcaatctgattttgaaaatattttggatattttcgtttcaaattttgcaaatccaacatttgaatcaagtttctcaaatcgtgaaatatttgctgttgataatgaacatactgttaataaatcaagaaaaaatagattatcatttcaaggttataaattattagctaacaaaaatcatcaattttcaagattttcaactggtgattttacttctcttactgaaagttgtaaaaaatatgatattcgttcaaaacttttagagttttataaatctgaataccttcccgagaaaatgagttttgtattacgtggcccacaatcattgaactatttacaaaaattagcaatatcaaatttttctaaaattggtatggaaaaatctattccaattaatttaaaaccgaaaatttcatcaaattcattaaatattaacattactgaatcatattggaaagataaatatagtgtcccagcatatactaaagattgtttaatgagagctgttttaattgataaagatttagattcagttctaagggtcggtttccccatctctttgaaaaatacaaattcttcaaataatagacaactaagcttttttattaattattggtgtgaaatatttggatcggattcaacaaatactgtttcatctgctttatttaaaagagatttaatttcagatattatgacaaaaactgcaactgttacctatgataatagtattattgaaattgaaatggcattaactgaaaaaggtattggaaatatttattcaataattaacattattttcaattacatttcactttttcaaaatgataaagattcaaaatcattctctaaatttactaaacatcttgccaaatctatgtcacaatctaatggtattgggatctataatttcctttatgctgaaactccttctcaatcaaatattgaagctaaaaatttaagtaccaatttattgcatgatgttaaaaagaatggtcaatttttcattaccggtgatgatttatatgatgatttagtctccggattctgtggtgcctatggtgaatccgagaaagctaaacaattttggatttcagaagctgtgcaattttgtgaatttgttaaaaataacttcaaagttgataatttgttggtatcatatgttggtaatatttcaaaaactaatttagattggttagatgttgattcattcacaagtgcttatgaaaaagattttgatttcaattataaaatattcaatatcaaatcaaatataaacgatttatcaaattctaaatcatatgaattaaacctttctccaccaaatgaatttgctgatgaaattatacaagatcaaacaaaacttcttcaaatggtgaaacaaactgctgaaaattcagctgatgcctccctaggattttccgttaaaaatttatcaataatggatgttccaaaattatatcacagtgatgctggttgtcaattatgggttaaaactgaagttaatgatatgtttgctaacaaagcatttttttcaatggagttaattaatactaaaattggtgaaagtccaatcaatgttgcaactttagaggttttgattcaacttgttaaacatagagtcaaagaatacttatatccagcaatgattatgcattactcatatgatgtttgtccttcgttaaagggtgatagtggtattttattaaacgtttcaggtcctcgtgaaaattttactaaagttttagcaattatcgtttatgaaatcaaattagttgcatctaatttcaaaagttcaattactcctgaagaattcaacttagccaagaatgctgttttattgagatttaaaaatgcattaagtatgccaagtattgaattagttacattaggtatgatggctattattgaagaagatacatggttagttgaagaaagaattgaagcacttgaaagtttaacgttttctgatatctcatccattgtacctaatttgttttcttcatgttatttatctgctcttttagaaggtgaagttgatggattggttctgaaaaatgatgtattaccgatattagcaaaattagttgataaatttgaaggtgaaaatcattctttcccatcatctgttgtattaccaactggatctaactactttgccaaatcaacaactaaggataaaacaaatgcaattgattatttcattcaaacttgtttaagggataatatggttgatagatcaataactaaatttttatcattcattatgggagcagcattaactgcaaagattagaactgaatatcaactaggttatattgtctttgttggtttgaaaaacatgagaaaaactcaaggtattcatatttcagttgttagtggaagtcatactgctgaagaattagatggtaaattagatgatatagtgaatgaatggtatgagcaatctatcaataaaatgaaacaatcacaacttgataccctgattgagaagtttttagctgctgaatctgctgcaaatactgtcaattctaatcacttttcaaatgctcttttcggtatattaggtggatctgctggtgatgttaaaagtatgaaacaacataatagttactggcaacaaattgaaaataaaacttatttattctcaagtaatttgcaaggtgaagatataattgatttaaatgctgttaaatctcttaaggttggtactattcaatcttttatcaagtctaagatattaccaacatccaaactaagaagtaaagttgctgtatttataaattcaacttgttcgaaggaaaaaatcgaaaaaaattatcaaggtatgcaaatatttgtttttctttcttcaatgggattacctattaaacaagaacatttagaagatataatggaaaaatctggtaattctcaagtatcattatgtaaaaacttatacaaatactacagagaaaagggtaaatcaatcacattaattgcttctgctatggctaaactttcaacatctttgattttctcaacatctggttcaacgtcatctaaaattgttgccgcagtttctgcaattgaaattgaattaagtcaacttcatgaatggcaaaaacatacaggtttatatagagaccctgtcactcttcatgataaactctataaatttaaataaaaatacaattgctttttcttccacataattttgatatataaatttttttatcaactacagtattttcttacgacaaacccaatattcacatttataattccaagatcctaaagatttaatgtcacctccatatgtagaatttaaattggattcgtgaataacaaattcaaatcccattttctctattaattctatcaagtcgtcttttgaaagttccaagcctttaaaaggaactctttgcggtgttgattgatctggtgttttagttgtgtattcattgtcatcatcttcaaaatgccacagtaatgggccaaaatttatccaatatccatcttctcttagagaatacttaatggttttaagataatcaataatattagctgcagtatctaaaaagtaacatgtggcaattatatgaaacttattggcattttgtttacgaaactccactgctaatggatcgtttgtgtacgtatctgatatttcacctctatctggtggtccatataaatcgacaaagcctccagctatcattgacatcaaatctgcaaccggtatatctgggtattgttcatttataagtgatatatctcctgggttaaaatcagggaagtaaacttgacgacattgatagtttcttttttcaacattggaatttttatgaatgaacggacatagcacaaaattattggcacaatatgtgttgtttagaataaaatttgaattgagaagcatatgatatgacaattcattaccctgagttgaaaaccctcttttaacaaattctacaactaaacggcctaaaccagaacctggaaccagtacttcaacgtttggtctttctgtaacaacagggaaggctttttctgcaaaatccaaaattcttccaaatgaaacttcacgttcagtgtggccgtcacttgaccattcacgtacatattgaatcataatgcttctaattttatcaaaatcaagagaggaggccttgtgccaagtttcaaattcgggtgcaccccatatactacccattacatctgcaatattggtaaaatagctactgtttatatctatgctgtgtttgagttgattcaaatagttcggaaaccattctattaaagacttctcctcattattcaaagattcatatttacgttgttttgatataattaattgttcatttgcccagtttccatagtttttgtgagcatcaagtacggaagataatactttgtattcttctatatcatcggtactcattcaaagttacgattgttcatatctacaaaaacagaggtgtgtctctaagattattaaaattgattggcaacaaatttatttaatcactataaaaaaatattacgtaatgtttgttttcccaattaggggttgttgtagataagaaattgttaccattcaagatgataacttttgagctattacaacagagatgttgagttgaaagagcattcactatgtagatttcagttggcttctgagctcttcattttgctttatcagaatatcaactttttctgttaatttattgactgtttcaatgattttcaaactctcaagggttacacctttattctgtgcatcagcggtatggggtttaagtttagcaactttatcattccacgttttaaagtttttagagaattcaggttcaagcatttcagcatctctttgtctttgaattgattgagcagcaatttctctattatgttcgttagataaatcatcatcaaatccatcccataataaccattctctgttttcttcatttgcatcatctgacaaacgtagtgaacgattgtatgcaactcttttagcgagtttagattcgtagtttgaaataaataatagcaatgggaaataaagaaccactaaaattttattgcaaatatcattgaataattttttatccatccaccaatatagtggtacatcaagcataaatacttcaattatgttaaatggaggtaagaatattttttcatctggtgctctgatatatttcaaaaccctagttgaatattgataaagatactcatcatttccattagcaactacatcagaataagcttgtgaaaacaaagcaattaaaatattcaacaagataactgaaactaagaaattgtataaatagtaaagaatgcttccatatggataatcaaacctttcaatacttttgaaatcaggaccgctcaaaactgttcttagcatattagtaataataagatatgtcaaatcgctcttaccatctgcttgatccaaaccaataaaagcttgtaaaaatcccacaataatcactgataacaggaaaaaaaatatcaaagattcctttagcattgtactaatgacaattataataacaccaaagaatttataaagatcacaaaagaaaaacatacgtatccacatcaaaggagccgcaattgccatgaatctttgtgatgtgatattgtacatgcttgcatgatctggtattttagaatatataccaccaaatctaaaaccaattgaaacaaataaaattgtatatagcaaatcattaaaagcatttgagaaggaaagatagctcagacctaaatgataaaatttttgaaattcatctaaagcaaaacctagagtgaaaaaatacaaagcagtttcaaaaagattcaaagtatcagaatcagcatcgatatttgcaactaaagtgtaaatcaaaagatataaaagagcaacacaaatttctaaaacattttgatataaaggggtttgaattctatctggattgaaatgtgaaaaatagtttgtgtcggccttatcattgtatagaacatactcagatggatcattctttgattgcacaatccatccaatccataaccatttgatacatctttgatatcctgcagttgatatgatcattgaatgggtatcaactgccaactctaaagcattttccggatctgaatcttcatcatttaagttgattgagtatctatgacaaagcattgatatgaaaagatacttatcatctttttcattttcaatgatagttgatgcaatcatttgagcaaacaaagatcttgtagtatataattcattatttgccaattcagcatctgctaaagtatcataccaaccagaaacttttaataagcaaaaaatcaaacaagcttgatatcttcttgaagatgaaattctgtttctgccatcaatagcattttcaccccctgcagctccataaactgcatccaagacttccttttgaggtaaattcagctgaaaatttttaactttatcttcagaaacaggtaatggtacaattgtatcaattaacttcttaatatttatagccacacgtaaagcttgccttggagagacgggctgataatcattcgactcttcattattccaaacaggaagcatcatcccttttcttgatgttagtcttgatcgttagtgacataattcaatttaaacccgattcaaatatagatacacatcaacaatcaaaaagaacgagtgggacgtgaaaccgataattcaaattattcattctgccaatggtcccagtaattattgatagtacgcgtctttttcttaaagataccacatttaaaacttttttttaggtgtccacctttattaatttcttgaacttgaaaacacacatgtgtggatagatgctattatataaggttcatagttcatagtctctcattacttgctttaacaatgaaaggatcattagatttgaaagaattcccagagtctttacagaaaggtattaataatgtcattgaacaatgtcctacaagtgaaacagttttcaaagaattgattgattatcttcaaaacggtaaaccaggaaataacggttcattaaagcgtaaaagagttagttttggtagtgttgacatcgtgccgccaaatttaggtattaattcaaatgtaaatactggtgtatcaattgaaaaattacaggatactaatattatgcttcaattacctgaattatcaattcaatcacctttcagaaaaaggctgaatttagtatttggagctgttaaaaatgaaaaaagggcttacttagcattatcaaaatctttagataccacacctgaatttataataagaacattaactgatgataatataatatttgcagctatattaaatgttcctgaaaagaaaccattgagatatcttttggtaagctataaagaaaatgatggtaatatgtttaaaaatgatccccttttaattcaatttaacaatgatcaacttgaagaacaatttggttcaattttagggggtaaattttttgtccaatatttaactactcaacttatgttagtaaatttcaaaattacagattatacacagactgatgaaacattttttgtggggtcttataagggaacaaaggaaggatatttatactttttacctaaccatgttgtatttggatttaaaaaacccatacttattttcaaatctcaagatattgaaagtattacttataattcaattactaggctaacattcaatgttttacttgatgttaaaatttatggtgttgttgaacaatatgaatttagtatgattgatcaaaaagaatttgaaaaaattgataaatatgttaagggtaaagaatttagagataattcaatggccgatgaacataaagctcaaaagcaacttaaaaataatactgatgcacctggtgatcttgcagaggctgccaaattagttccaggtggtaatcaaatagtagctacgaatgatgatgatgacgatgatgatgatgatgatgataactatcaaatcggtgatagtgatgatgatcatagtgatgtaagtgaacctgaaaatgaagaacatggtgatgaagatgatgatgatgaggatgataacgaagattacaatggcgaagatgatgacgaagatgatgatgatgatgatgagtatcaaggtataaatgaacaagtctcaagtacagtaagcacaattacaccaggattgtattctaacatggacgattttggttcgtttgatgataatctacaacaagaactccaagatttacaaaaagatttggacattgacatcaacgaactacaaaaagctggatatctttagctttcagttggcactttttttaatacattcttattaaagttttttgctcatttcaaagtctaatttttatagttaattaatgttatcatgtctgctagtgctgtttctagttttgactataatatctagtatatgccttccatatttataaaatttggacataatatttgaatttttattaaattatgaaaaaaatatacaaaatgaaactaataaatgaataaaatggatttttttattgtctggtatgtttaagctgatgcttctctgagttttctaagtttgtttaatcttaattctaaaagttcatcattcttttcaacccattgttcaaagaaataaccaattccggtagtgaacgctgctgagtaaataaaacccattggagcgtggagtaatggggcttgtctaatacccatttgtaaagctctgacaccaatacctgtattaattaaaagttttcgtcaagaattatatttgaccatgaatgttagtatacttgtcttataagtaaaaaattatgaaaaaaatgacagtttcaagaagtgaatatgcacttctaaaatagataacataccaaatactgaccaagctaataacattgctgatttcttgtcctatgatatcaatttgaaaacgattcaatcaaattgatcaaactctttcttacttaaccactttacatgttggtattcctcccctcactaaaaagtaaaattggccgcgtttttgattggcagaattttgtgtcacattttccatgtcgcgaggctaatacttattcttaaataaaaagttcaacatgaattgaacttatccagcaatgagggagagttacctatttaggtaatatattctttcttttatgtgctagatatcagagagtagagtaataatgtggatagcagataaaacatacatttttggagactgtagtgtttccctgttttctgccgtgtcatattttgtagattggatagtttatttactaatcctattatttgccttgatatggggagcaactaaaactccaagagagacagatttcagttatgcggatatttccattatgcatcgttatgtaccagaaaataaaacatatgcaccagtttggtaccttctcattatgatagtactaattcctttaataatgattgtagttagttgtttatggtttctcagggatagaaataagaaaagattactttgggatattcattccgcagttttaggttcttttggagcaatatcttcacaattacttcttgtcgtcattattaaaaatatagctggaattccaagacctgatcttttgaatcgttgtatccctgatttaagtaatgtatcacagattgattcaatgataactaggaattattgtctgcaacccaatataccccttcttaatgagggttttagaagctttccaagtggtcattcctctacaatatatgcgtcacaaacattcctagctttatttttgtttggaaaagttcaatttacatgcagaaaatattttacatggaagttggtgatttcaattatctaccctgcaataactgctatgaaaatagctttttcaagagtttcagataacagacataaagttttagatgtgatattaggcagcatgataggtttattatttggaatatttttttatttcctatactttacaaatccttttcaagaaaaactatctgtggcaattagtccgagaaagttcacagttggcaaaaatgaacatgggtgttttcatatagatatctctacatttgatattgattctgaaaattctgatcaagaagaaaaatatacagagtcaattgatgatgaaatgttacagaatcaactaatgcctaatttcaatacatttacaatacctgctatatacaaaaacagaagttatagtgttcataatcgtaattctggtttataatctgaataaaggggtttctcctaaattatatacagggatatatgttcttttgtttatttacctatacaaaactttgaaaaaacgacacccaagatttcttctactcctatagcatctcctgttattttaccaattccttcaacactggatcttaaagcttcagaagccaaggttatatcatcttcttccttaaaatgtagaaattcttcaaaaccaaaaagaacatcattaattaaaatatcctttgcacgagtggatattgtaattggatccttatctgttatatttgttatcgttttgaatcttctcgtcaaatcattcactaaatcttcaatcccttggtttgttttgcaacttataaacctgacattttcttcacttatgcctaagctttgggaaattttatttgataaattctttttagcttcatgatcaactaaatccgccttattaattatcactaaaaattgtttctcgtcattggtgattaatgctttagcgtgtaatagaaagtctgaatttatctccatctcatcagctgagtataaaagcacgttcatatgagcattaagcgattttttctttgctcttttgataccttccttttcaattatatcatcactttctcttatacctgcagtatcaccaacaacaactttgaatccatttatatctaatggcacatccatggagtctctggttgtgccgggaatattactaacaattgccttatcttcttgtgcaaggatattcagtaaactacttttaccagcatttggtggtccaactaatgtcaacttaattccatccaataaaacctgtgaatattgaagttttctaagatattcttcaacttcatttttcaactgtactacatctttctcaacattaccaaataaatcgttaatttcttctatatcatggtcttcaccaaaatcaatgactgttgtcaataatgcaatatctttcaatattctttctctccattcattaaacaagacatttgtttcacctttcattgacgcaagtgcactaacacgctgaagttctgtttcggcatgaattaaggtgtttataccttcaacttctgtaagatcgaatctttgattctgaaatccacgttgggaaaattcaccaggttctgctaatctaattggggaacttggtgtgtgaaatttagcaattgtttgcataactttattaattattgcagttcctccatgtagatgtaattctaataaatcttcaccggtataagattttgggttttgaaaaaatagtactaaacattcatccaataatagttttttagactctacagttccatctggtaatttattcgtggttatatcataaagttttctaagtgttgctattctatgtttaggcaggttcttagataatgttaatttctcaaaaatacttaatgacgatggtccggtgatacgtattactccaatggcagatctagcgggtgctgttgaaagtgcataaaccgttggtgttttaaattcagtttgtctataaatcgggcataatgaaaagagtcttttctgaactgttctgcaattgttcatatattgatgacttcgggggccagagagtatcgtttcaaataaagaaagatcattaatttttaataaagtttactttgaatctaattttttttagatcaaggtgaaaaaaataaatgcgttaagaccttttttttgatgatttttccaaattataggagtgatttgtgaaataaatattaatatgtatcatttaacaatttttttagatcagaactataaaggaaaataaaaacaatcaaagttagataagaaaaatgaactataatacaattataaatatgtagtaaagcaaaagaatgtaagtaaggtatattaaattgtgctgattataatcaaataatgaatgatgtcattatagttattcatcaagctgatagtattttatgcattcaaggagtggaaatacctttagggtttgttttgatatgttcatgattttcaattgaactatcaataatctatgagacatgaacattaataaatcgtcagaatattgaataactaacttttttcaaaattgggtgtttgtttttgattatatgattatagtttcaagcgattgtacaacaaccagatgagtttctttccatgggtcttgcaataagactagcccttgttgcaatttcaaagacatcatctactgcttcacctgtaagagatgaacattcaatatattttttagcaccaatatattgtgcaacacgttcaccatccgatggtttaacatatttagttgaataattaggatcagaaccatcatctattggtcttaaatcttttttcaaaccaaccaatataactggtgcgttaggacaatattgtctaacttcgtgagcccattttacagcagcattttctaatgaatcaggtgcatttaatgaaaatccgattaggattatattggcctttgaataagacagaggtcttaacctttcatattcttcttggccagctgtatcccataatgttaatcttacgggcttgccgtccacacgacaatctgttgcataattttcaaaaactgttggatggtattcagttggaaattcacccaaggtgaaaacataaagtagagatgttttcccacatgcaccatcaccaacaataactatttttctttttataacgttctcgttgttaggtcctgtactcattgatttgatgaatttttatttttatttttaattttatttttgattttgattataattataattataatttcagttagattatgatataatttaaaaaattgttttttgttttggaatataatgtataacaatcagtaaattgtgtaaaatgactgtggatcttttctattcaaatgtatacgaaattctcttcagtgatcaatgacgattgttcgtggggtatattatggtatattaaagacaataaaagcttttattctgagtgagacactgtgaatagcaatacaatgaagagcttcttttgttaaagggaaagaagtcaaatgcttagtgctttggggaatagatatataaaacaaagaacttggatacaaacactgattaactacccttaaagtgataaatttaataataaattaaatgcatcaacacgattctcattctttgagaggacttactcaccctctcagtgaaataaaaatagaaattttatttatctcatcgatgcgtcttttttgttattatggaattacgtaaatagtatatagggttacatattatggcattacagttgttatacaacttcagttacttaagagtttatataatgatgttgactctaaagagcagatgttggtgatgagattaatggacttttctcagatagtgaaattttagaaagatctgtctctatttctccaatattcggtaaattgagtggatccataatattattgataccagtaaaactattcagattcaaattgaagttattatttgagaatccaccaatattattattcgtagtacccatattacccatattaccaagattactcataccattcatagtattcaaattacccatgttattcatgttcatatttatattagttgtattggtcaaattactaatattattcatattattcatattattcatattattcatattattcatattattcatgttatttatgtccatgttcatgttcatattgacaccaggcggattattaatattcataggcacaccggataaattatcaatactcaaactattagcatcaataccaacaatactattattcataccatattttaatggatctataccaatagatgaaatagtatcagtttaatggattcaaactattacctaaatccattcttccattcatattcatagacattaagttcatatccatattcatgtccatgcccatgttattcaaagagtttaaattattcatgttagtcatgttgttcatgttgttcatgttgttcatattgcttatattacccatattattcattcccatattactaaaactattaatattattcatgttattcggattatttatgttataattaccaagatccatattaagattattcataccattcattccatcattccattcataccgattaaattcaaattgttcatactgttcagattacccaagagaggactatttaaattatcaaaaccaaaattcaagttattagaaatattattgaaaccgttattctctgttgtagatgtaacagccggattgttcacattacttgttggctgatgagaaattgttattattcaaactgacaccttgtgtattcttatgtgggctcaaataggtgttattaacattatgtccactaattgtagatccatcaaataatttaacagtaatagaatcatcttcgcctgcaagaatagaataaactttctcataaccatcgccagatactaaagtttgtaggaaatctgttaatgataatccatggttcatatttgtttgagatgaaataatatgttgatataatgataataatgtgtaagtgtttttagtaggtaggggtaacattagcaaatgccttgaaataactcatttttaacattgtcttcatttataactgatccttttccagtttgagggaaacttgctgaagcattactaaaactattccatggattattcatagttactggatttagattttgactagctgatgaccatataggatccttgacgatgatcttttggaacagtccctggattgatattattattcaattcaccgccccataatgaggaagtagttaagtcttgaggggttaagttcatatttggattaatagcacttgcactagcgcttcttgattcatagagtgttggatttaaaagaacttgacttaaatcagtattactattggataaattattgttgttattattgaaaaaagtatcattgttcatagataattgtggatgaattagttgagaaggagtttccagtattagttctacgaccatcagaaatttgagaaactgaaataggagttgaaactttgttatcagtagaaatatcagataattcaggttgtgcttgaagttttacccttcaaattactatcttttttcaataaaattggtgtagctacattagctttgttcaattcagcttgttctaacttcttttgttgttcttgtttcaatttaagttcttcttctttttgtttcttctttttagcaattttttccttctcttttctttctttttcttcacgtttgattctcatttcttcttcccttttaagtctcagttctaatttagccttatccttttcttccttctctttcctttgacgttctaattcagcttcttttctctttcttttctcctccaatttacgtttagcttcctcttcatgtttcttcctctcattttctttacgttttctaccttcttcagttttacgtaattgttcttgcttttctaacaattccttctcttgcttctctttttcaagacgtaacctttcttcttccttagcttgtttctgtaatcttttcttttccttcaatttttctttcttcagtttttctttctcttccttctctctctttaatttggcttctttctcttcttcagctagtaaagttttggaaatttcttctgctcgtctagcttgaaaagcatcatagagtcttcttctcaaaatttttgaggaacaaatttgtaacatcttatacgtctcttgaagtctcttacgggatgtataatcattcactctatcttcactgcagtttgaatcgtcatcttcctcgtcatcattcattcttcatcttcttcttcgtcgtcttcttcaacgtcttcttcttctacgtaattcagcatatctgcttcttcaccttcttcttcataatattcttcttcttcttcttcttcttcttcttcttcttcttttccatcttcaacttctctgattttttgttgccctcttactaacagttcaacatttctttctaattttccagttttttcatctattcgttgaagtaaattatcatccagttgctcgattagattaataaaatttttaccattatttttgacaatatcatctgcaacggataataagctgtttacatatttctgttcagatatgtttgattttcgctgatctctatcatcatcgctttcttcctcttcttctccttcgccttctacttcttcttcgtcttcttcttcttcttcatcctctgattgtaaaattttttcttgttctactattcctaaaatagcattcattgtatttatattcaaatcaacttcatctaaagattttacagctaatcttctcacgttatagtaaccattgtaaagtttttctaattctctttccactaatgattttcctattgaacaaagtttgcaagaacatctagattttggatcattgtacaccagactaatgacttcagaaaatgaaatatctgaaatttgtctttttctttcataaggtaagccaatccagaactggaccatatctggaatatcttcagggtattcaaaatcccaaagaaaatttcctaaaataggtgtttgaatttgttcatgtataattaatttttgtttttccaacaatgaagaaggtggtactgtattagctggtttctttttgtaaataggaccatgatttttgaaaaagtctggatcattggggtcacaagaacaatgatgcccttcataatcatcatcgtactcatcttctccttcttcaccctcgtcttcttcttcctcatcttcatcatattcataatcttcatcatattcatcttgatcgtgataattgtgattacaatgatcatcacaacattgattatgatgatttggctgaattggagggtaattttttctgtatggatactcttcagcaatttcttgaacaatcacatcgccatttggttcttgtttaatgacacgtgaaactggataatcagtatctaaatcgtttaattcaacctcgactgtcatatcacgatggtttaagtatgattggtttgtattgttgttatttctagtacttttgcctgtactttgcctgtacttttttttaaatactcctctttgttatactcgaaatgcacgtcttctcctgtaatgaaaactctgtgacatttctaaacgctgataattaaactaagaagattgctatatggtccgtttttgtatgatatttaatttaagatgaggttaaacgttgatagttgtaattctatatagaaacagcctctgtagaagccatatattatttccaaatcattggattttcatcactaactgtgaaaataaattatccctcgctaagtgaatttttcgtgaaaacattcctcaactggggatcgaacagaccgttgatattgatactattgattttgatatgcaatatttgtttttaaagtttgtattttgatagttatcctgttgtgattcaatttatggtgataaaccaagatattgaacacttatatatgtaattcattagctcttagtatcaaatattaaatagaaaatgtgttaaataaccctttcctttcttcttttattaccttcatcacaatgatcataattggtctcagttgtaaaaatttttattttatagttgataaatttttttgaaaaaatttatacttcatgtaaaaattgcaaattacattatattttcaaaattttttaggtcacgtgacacaaaaatatgtgaacgaaaaagcagtgctaaatttttgccctttcaaattttgtttggcctagcggaaacttttgtttatgagtatttatttcgacttctgattttgacaaacacgctttcttctgaaatctcatggataaaccttatgttgaaaaggtccaccagtgttgctggtatatcgattcttttacctcttgattcactaattgttgtactacacatatggacatcatcaacttttgcaatccagcatatgtgcgatcactggttgttccaataagtgaaattggcaagtcagattttgaaaatgtgttggagacattgagaagagtgaaagatgtacgagctgttgatctaatcaacaatccagggaaatttaatccacaagcctacccacagggtcatatatattataattttgttactaaagatgatgataccgaatctttattcttacacaactttgaaccttttagaaaaactgctgtggttattggaataacaaaatggaatgaaaatatgaatgaaactactatacaagaagcaaaagcggaattgaagagaaaatacccatctcctataactcaatttgttcttatatttgattgtcccaatgattataaaattgacatacgagaagtttatacagttgataaaaaaacacaaaatttggaaactaaaatatgtgatttaacatctagatttttgagtaatttttccacttatgcttctgcctatgaacatacaactttaagatcacctggtaatttgagtggaactactaaaaagactaagaatcgagtttcggtgtcatttgacttgaattcagaaaaagtgaaacagatgagttcccgtggaagaaaattaaagttgatggctaatttctatctcatggccggtaatttgaaaagtgcattatctgacttctgtgaagcaatttttagcttgaagtatgcaaacgactatttatggttagcttcagcttttgacggattagctgtttgtatctttcttttggcttcaattgcagctcctttccaattacctcaatttttaacacaaatactagattcagcaaaaaattcagtaaatcttttatcaactcctatagtgtcaccaagatcatctcttcaaataaataatgtcttgagtacattaaattcactgagagatgaaacttacacccaaaaactagatgttgttccgctggatgtagtggaaaaaaagatttttgaatgtggtatattagcttctaaatattatcaccaagcaaaagaatatgatatagattatgttccacatatagtggttaccgaaagcttgctaagatatgctactttaatggttttgattaatatcaatggctctctcaatcttgaacttattaatgatatattatattcaccagctaaatttaacaataatacagttactaaagattttgatacagatcacttcaataaattatgtttccatatactagatgttgattttaatcaactttcacaaacccaacagatgaaactgttttactccttatcattccttttttccaagaccaaaatgaatatgaagaaatgtttgatgataagcagctttattgatatagtcattaataataacagtattacttctgttaataacacagatagacaaaacttaacgtatttacttgaaaattactgtgaaagttatggaatagttacagatgaagttatcggagttctgtatcctaataaaacacagaaaaaaatcttgcttcaaattttgtcattttgcagaattgtaaactttcatcaaggatatttgaagtttggatcattatcattaagacacttcaattctttattcactccaaacgaacaaattgaaacatttgaaactatgactgcttttttgaaattccagatcagaatcaattgaatattgggatccaaacttacttgttgactttcactttgatacagaaaccaaaaaacttgttgaaggagaagaaagtatgatcaaaataactgttcgtaatccatttatgtttcatattgatattaaacactttaaactttcattagagagtaattttaagttgaaactttacaccaaagataagaaagagattgacaactcaaccatttcaccaactatatctgtgagaccatattctcaattggaaataccttttattatagtccctgaaaacaatggaacattgattgtggatggtatttatgcttctgtatgtggttgtaaattacaaaagtttgttcttaaagatcatgaaataatgtcatttgttcccaagattaataaaagatatgaaaaattttacgattcaaaaaatttatcttggagtattgatgtggttaatagccaaccatttttgaaaattcttgatgttaaattggaagataagtggttgatgcttcttgatggtgaaagaaaacaatttaaagtcactatgaaaaatacatcaaaaactgagattaattatttggtttctatgttcaaagattctacaactgaattactcaatgcagaactaaataacaaattgcttcaacctaatgaaatttatgaaattgagtatcagcttttaaagaagaaaccttttaaaattttgaataaaggtgacttagtaaaaattgatggttttgagctttttgatctggatgttgaaattattggtaaaattggcgtcaatgaggcaagcttggttttagagtattcacaccaacaagattcgtcaactgaatttcatagaaatatatctattccagtaaatttaactgtttatcctagtgttgaattggccggctgtgacatcatacctttgacatcaaatactaagataaatgagttaatgatagacccatgttgggcttatcttagtaaaatgaaagagaacaatcatcaactttcaaacttttgtttattagcattagattttattaatatgtggtctgatgagatggaaattaccttgaattatatgccaggtgccagtgatgcaaaacaaacaggagatgtgatgataaaagaagaacctttgcagatcaagacaactttacagagtagaaaaaatctgagaatgtttttgcctttggtaaggatggattttgatgaagagtatcttggtagaacaattcctagtctgagaaataaacagtttattgttgataagaaaacaccaatggctgaacaactgtttatcaaacacgcattttggtataaagaagaaattttgaaaagggtcaaggcatcatggaagatattaccaaattcttcaaactctatccacaagggtaagtatggtgatattgatttaagaggatttaaattttcttccaaaatggtggaagttttggaggttgagaagattggattgtctctaaaattgttagataccaatgatagtgaagttgaactgaataatgtaagtttgaatgaattttacacaattagaattcaattaacaaatagaaataaaactccaatatttggtatgctcagacatataccagtttgcaaggatcctccatatacatatgaaaagaaagttttgataaatggagttttacagtttagcgtggaaaccccattaattgagggggaaagcagggagtatgatttaggaatagtatttatggaaaagggtgaatgtgaatggggtgtactttttgatgaattggataattggactagtggtagttctgaaattaaagctcaacatttacaacgtgaacaactcaaatttaaggttaactgaattttaggacatttttacatcaaaatttgtaacatataaatattattatataaaaaataaaattagaatatatgcaatctcaatatgtcagatctgtgttctagcgttgaactactcatgtttatataaatctgcaagaaacaaaaggctaaaggtaatagtccaatttttttgaatatattcttagaaaattgaaaaaatgaagtacacataaaaatttggactatatattgatgcaagtcagtttttttggttcgattctttcagagggttcttccgtagcaaagcttaactaaataagatcatatatgtcaggctcagtgacacgtgcccaaggatggtgcataaatgatgaagaacaatatctagctgttagtcccagcggagaagtggtgtctctttatcaaactgatagcactacggacaacgaggacaacaatatagttaaaataagtgagaagactgaactagagaacattcaatgcatcaactactcagctgcaactccaggattgacaggtataggtcaacttgatggtaaatgtatattatttgatattagaaatccatctacacaatcggtagttttgaaaccacttcaatcacgttcatgtaactccatttcattcaatgaaaatggtttaattgcaatgggatacgatagaggacgtcaagatcattcaatccatgtttgggatatgaattgtttacaaaatggtgattttagaggtaaaactaataaaatttttagttgtataaataatgaaagtatttcatcactttcattttgtccaacggaacctaaaaactttgttgctggaagttataagttgttaagagaatacgatgtgagaagtaatcaaccaatttatcaaattgcaactagatgtactttaaatattacagttaacccattcacaccatttatgttcgcatctaacagtgaagacggttcattagcgatttgggatcgtaggaagttaacagaatcatttagaataacaaatatgaatcaaagtacagcggtcttgaatgaagcacctgttttatcattcaataaattattaaacgattaccaaagaagatcaaatggctcaccatacagattctcttccgttcaacaaggtgaaatcagtgcactttttgatggtgatttagttagaagatggcttataggccaggttcctgcttttgaagaagaaatcatacaatataattcaatggtaaaacaaaataaaaaggagaatccaatgtttattcccaaacttcctaaaccaacaggctcaatgtttgtctccaaagttcacgatacgaagactaaatatgaaagggttatctcatatgattatgcaccgtcgaagacatctatttatggaattgatcttgtttgtatgagacaatccggtagtatttacaaaatgaaggttactgatagtcaaaatagtattgtattcaactcatacaatgacttaacatttagtggaaccgacggagtttgtagtaaatatgtgaaagatgctatcaatgaaagagtttttgatatcaataaaaacacagaatttgatgaaaagcttcaagatttatccttaaataatcaaattggcaacaaattagaacctgaaaatttgaatgaaataaacaataaaagtagtctccagaaaaattccagtatgcaaattcaagataacaatgaaattgatgtttatataggtgaagcggatacaatgtgtttagtatcggataaactgttagaaaacgatatatgttctacaatgagaaatagagctacaaaaggatatggtgtagatgcaaagaaagatatggagattctcgactcgattgaaacgtatgagacccatttacatttaaagaatgcttggaaatggattgatatatcatataatttgataagtgctggcaaaatgcactataataattttgattttggatatttgggagttctaggtatctggaatatgaacaaagattatatggttttcaatagatatacaggatttgaaaatgtgacagaaaacgatgttacatatgcagctaaatgtatagttgagagaagagccaaggagtatggtttattagccaaacctgtaattggatttaatggtaaaagctcaaaggaaattgaaagaaagttggcaatgtatgttattggatgggattttggagctcgtgaattagaagataaacttaacggacttatatcaggtggtaactacgaaagggctgctgggtgggccattttccacggtgatattaacagagcaattaatatattgggcgagtcaaataatgaaaactacaaaatcatgtcgactgccattgcagcatattcagcattcactgactctaccacaaataatacatggaaggatagatgtagacaattagcatcagaattagcagatccatacttaagaaccatatttgcctatattgcagatggaaattggtgggatgtcttagatgaaagtgcattaccattgagagaaagattaggtgttgcattaagatttctaccagattcagacttagatatctatttgaatagagtagcagatactgttattgaaagaggtaatgtggaaggtataatattgacaggtattaccatgaaaggtgttaatttattacaatcatttgtcgatagaacacaagatattcaaagtgcttgtttaatttcatcatttgcgtgcccgaaatacttcaccgatgatagagtagaatcatgggttgatgattacagatcattattaaacagttggagtttattctcagtgagagctaaatttgatattgcaagaaataaattatctaaaaaaattaatgaacaaagtgctattccaccagttccaagacaactgtttctacaatgtatcaattgtaataaatcaatcataaatgaaccactggtaggagctttaaaatcaaggaaaagaaacaccaagacatcctgtaataattgtggatacccattacctagatgtgctatttgtttaattacgcaaggtgttccagttccaaaagaggtgatgcacatgaatcatttcggagatgaggaagctacgggaccagatgttactattgatacaaatagaagacataatacgaatagccatgcagatatagatgctactttaaagagtggagacaatacggataacgaatctcaatttaaggaatggtttagtttttgtctgtcatgtaatcattgtatgcatgcaggacatgcagaggagtggttttccaaacattacgtctgtccagttccagactgtgattgtaaatgtaacaatcgttaagtaatatatatgtagtaaatactgtataaaaatatgaataataaagcttaaaactaaatatagaaactcagtgaagtagcatgattaatgataatgaaatatcagatcaatgatgtgaaactgagcgaaacaaaatttttgttgacaatttgggaggaatggagtgtttgttacttgtttaattaaggcgttcgttcactttctctttattgtatagctttcaattgtttccggataagtatccttcactcatatttatacagtgtacacatagatagtaatactaatatacccaaggattgttttattggaatattgctagattttattttgtacagggaacatatctgattatttaaaaactcaaacaaacacatttcccctttttctaacgggtacgatataacaaaactaagccattgagaaacttaagccgtcatttcttttattttagaatacaaagtactgtaataatagtcaataatattactccaaactacaatataaagcacaatgtcttccaatccagcttcaattaaggataaaatatctgatattttgaaaaaaattgatagggagaagaaattagcagagggggcatcccatttgaggaagaaaactgacaatccagcagttattcaaaaatgtaatacacaagttagagaagctcaagttaacattgaatatttagaatcaattctaagtaaattacaattaagtgagcaacaaaatgccagtagtgaactatcatcaccaaataatatctaatccaaagtcttataatcaagttagacaaaggcccctctttacagctctggatttagtaaagtatgattgtccatcattaggtcacaaaattcaatatatgatgcaacttttagagtttaaaattcaggttgaatcccaagtataaacaagcaaatgaaaaaatgtatagtctttatcaagcagaaggtgatagatcaagtattgctatggctgaacggggtaaatctgaaagtgacagaaagttacaattgatgaaaagagctttaaaagaatatcaatcaatgtacatagattttgatgatattgcacgtgaaaactcaatgattaatactgtaagaaaaaatcccattatccggtgttttatttattcaaattcaagctgtgaaaaatgttgatcatatccaatcacctttattttctagaaatccagaatgtgttataagtattaaaatagatgacaatgagagagcaaaaactaaaggttcaagaaatgatagatgggccgatttttttgatattaaggttgataaagcaaatgaattatcacttaccatttatgataaagttaatgatcaattggtaccagttggtttattctggttatcattatcggacattgcagaagaaatacgtagaaaaaaggttaatcaagaaagaattacatctgaaaattggatagatccatcaaaagttaaggaaagtagcccaatttcaaataatttgcatacaagttcaaaatcaaatttattgacatctgttccagaattatctgatagatcattgactgcaacttcagaatcctccaattcattccactgtgtcaaataatcttcctgttcgatccactggttggttcggtttagaaccatctggtgaaatctttcttactttaggatttgttaaaactaatgatagtaaaactagaattgatcacaataattttactagtggtttgggtagacatggtgctattcgtcaacgtaaagaagatgtcattgaatctcaaggtcataaacttgttcaaaaacaattttacaatattatgtcatgtgctgtatgtaatgaatttttgagatatacaggatttcaatgtgaagattgtttgtttttatgtcatcaaaaatgtatcaaaaatataattgcaaaatgcatttctaaatctaattctgaatcaagtattgatgatactaagttaaatcataagattccacataggtttaatcctgtcactaatcgtggtgctaaatggtgttgtcattgtggttatatattaccttttggaaagaaaaatgtacgtaaatgtgacgaatgtggtattatgtgtcatgctaactgtgttcattatgtacctgatttatgtggtatgtcaccaaagactattgaaatgattttggaaactttgagaattaatcaacaaaaagctaataagaaaaagctaacttcagcatctaaagtgataaatgatgttaaatcaattccaccttctgaaagaaaatcagaatcaacaactttaatcagttcagagaaagaagaaaagaatttattagaaaaaacttttcacttataacttaaatgataataatcacatgaactatcatgacaaagtattaccagcaacagatgatcagattgaagacaaacatgttcgtagaccggaaaataacaaagttaatgatcaaactaaagttaccaaaactgttgaagataattatccatcaattgctataacaagaaaaagtttagaagagacaaatgataaagatttgaaacaagattatgctgatataaacgatggaagcagaattccaaaatatccaaaggaaggttccaagagtgcaccagttgatttatcatacaatgaatcaattcaaccaaatagtgttgttcatccacatcacgcacaacaacgttctcaaccacgacaaagccgccaccatcataatcaaaaacgtcgtcatcgtcgtagatatggtctggatgattataagtttctttcagtcttaggtaagggtaattttggcaaggttatgcttgcagaatatgtaagtgaccagagattatgtgcaattaaagttttaaagaaaaatttcattgttgaaaatgatgaaattgaaagtacaaaatctgaaaaacgagttttccttgttgctaataaacataaacatccatttttactgaatttatatcaatcatttcaaactgaaaatagaatttattttgttatggagtatatcagtggtggtgatttaatgtggcatgttcaacagaagaagttttcattaaagagagcacaattttatgcatcagaaattttattagcattgaaatttttacatgaaaatggtataatttatcgtgatttaaaacttgataatatcatgttaacaactagtggacatattaaactagcagattatggtttatgtaaggagaatatgtggtatgggaatacgactagaacattttgtggtacaccagaattaatggcacctgaaattatatcaggagagcaaatttatgataaagctgttgactggtgggcatttggtgttttattatatcaaatgatacttacgaaaacaccatttaagggtgacgatgaggaagaagtattcaatgcaattttgacagatgaaccattatatccaattagtatgtcaaaagaggcagttgatataattcaaaagttattaacaagagatccaaagcaaagacttggagcaagtgaaagagatgcagaagaaattatggaacattcatattttggagatattaattgggatgatgtatttaatttacgtgttaaacctccatattgtccagatatgggagatccaagagatgcaagatgttttgaagaagagtttacatcacaagctgcaaaattaacacctgttaacagtgttttatcaccaaaaatgcaagaaatgtttagaggatttacatattcatgtgatgatgaataaagatctagataatagattattaaaagaatatcagctttagctttgtataattgaataaaaatgtattaaaaatcgatataattaatgacttgataatttttaaataatagaaaatggagaaaattcgttccacttagtgtggtccgatgaaaaatacatgtcatcatcggttatataaatgcgactcttttgaatcaatcatttactacgtgttgttttattttcctttcacatttcttcccacaacaaacatgggtttaaaaattgacacattaaaagaattaagagaattaaatcttttcgatatagttaaagatgtttttgataaagcattagaaaatggtgatttaatttatgatgaaaatattgaatttgaaagagttactgatccagggagtgaaattgagaatgagattaagatagtgagtggattatcaaaaagaccaaataatagagcaagtgaaccaggtaataaggatgaagagattaatgaagacaaattgaatgaagttattgaaaaaaatccatttttaaaacctgaaattgaattaactgttattgattcattattaggaaattatagattaatcttaaataaattcccaaatactaaatatcattttctcttagttactaaagaatttgaaaaacaggatactttattgaaaccaattgaattacaattaatgcatacaattttagataatttgaagaaggttagtaataaagaatatttttcattcttcaatagtggtagtgaaagtggatattcacaatttcataaacatattcaatttatgatgttaccagatggattccgtacatatcaaagtaatgttgttagaggagttaattattttattccaaaggaaattattgaaaatcgtcgtccaatagtttatgaaaaggcaagttataaacattatattttaaaattaaaggaatatgatatgtatgagaatgaagagcaggaaggaagatgaagaggattcattagcaatactttatatgtatttaattaagagaataatgaatatttttaaagaatttgatatggaagataagaaattaagttataatttattaatgatgtcaaattggatgatgattattccacgtagatcagctaaatttgaagatatttggcaaaattcacttggatttatgggattattttgtgttaaaaataaagaacttagagataaagttatgaatattggaatttctaaaattttacaagaatgtggattcccaatggaggaaggagaacgtgatattgtctataatgaatatggttattaaataacttaacttgacttaatttgacttgacatgaaattaaatttgaatcattttttaaattttaaataatgtatagaaagggtaaattataaatataaagtatcataaataaatagataaatagataagtattgaactattgtaatgtatttactaaattattttgaaacaacagaattattaagagcatatttttcagctaattcagcttcagcttctaagatataaggagtaagataaggagtatcttcatgagctttaattgattttgattcaggtaagacatcaactgaaacagctaattgatgagctgtaataattctataatttctagcataagattcttcaacagggtaatcttgaaattgccttttgcattgcaggattttcttcaattaataaatcatctaatttaagacctaattgtctataacctgataaataagtgaaaattttagcagctggtaaacataattgtcttaaaagaggagttttaagaataaaatctgcttgtttcttgactaaggtaagagaagacattgctttgttgtttgtaaatgcaggaaactataatgcaaaaattatgaactaatcaagtttcaatatatcattcaagccaggaatacaaaaaatcatgttggaaaaaataataatattacgttgcgaatgtcattaatttgattggacaagtaaaaagacgcattacgtaacacagacgcggcgcaacaagttagcatgtcacagtcacgtgaccttttgcttatgtaatcatctcattaattataaaaaattaaacacgctttatttacttttgactttgaaagcgtgttttctattattatcctttttgtaaaagacgcgtttatcttatcgtgttttatgtttcaagcgtgttttattgaatttttcattattattattacaattattataatatctttacttatttaggtatcttaattgtattaattagtcaaacttttcacctctattaatctacaaatggaaatcttatatattccctacctcttttcattttagtttaaatatccctgttattctactactttcttcattttaatattcttttactttaatttgctttaatttagtaattcttttcttcgtcttcttattcttcttttttcttttttcaatcaatcaaacaaacaattaagaaaatgaatctctcattattaactatcttaatatcattattttcaattgcattagcagatgatgataattcaaatgattcaccaccatcctgttcagctgatagtcattgtcctgaaaaatatccttgttgttcaagttcaggtacttgtggtacaggtactatgtgtttaggtacttgtgatccaagattttcatttaattcaacttcttgtttacctgcaccaatttgtaaatcaggttcttataaaccaagatcaaataatatgattgaagatgataaatactttaggtaatacaactaatattgattttacttattatggtgatgttgaagataaagatgattcagttataattaaaatgccacaaaataaaagtggtggtgttatatcttccacattctatatttggtatggtaaagtttcatttaaatataaaacttctcataatggaggtgttgttagtgcagcaattttattctctcaagttcaagatgaaattgattatgaatttgttggttctgaattagaaactgctcaaactaattatttctttgaagcaatcgcagatcatactcatggtgctaatttaaatacaacgaatacttatgagaattggcatacttatgaaattgattggaaagaagattcaattacttggttaattgatggtgttgctttacgtacacttgaaaagaaagatactttaaattcaacttcaaatgtttatgaattccctcaaactccttcacgtattcaattttcaatttggccaggtggtgcatcatctaatgctcctggtacaattgaatgggcaggtggcccaattgattggaatgcaagtgattttattgatcctggttatttatttgtttctgttgatactgttgatattgaatgttatgatccaccttcaaattctcaaaagcaaggttcaaatggaatttcatatatttatgatggtaagggatatttagaggaaaatattattatttctgataaattaacttggatttcagatttaggtagaactggttttaatactggtcaacaagatgttttagaaaatttaaagagaagttcaatggctagaaattctaaatcaagtacaacatccaagtcaagttcaacatccaagtcaagttcaacatccgaatcaagttcaacatccaaatcaagttcaacatccaaatcaagtttgagttctagttctagctccacttccaattctagttccagttcaatttcaaaaacaagtgaaaccaccataaaacactctcactcaactagaccaaccacatcgattgaatccacttcagttccaatagttgcagatccaactacatctgaaaacacaacttctacaacttctacaacttctacaactcctacatcaacatcaacatcaacatcgtcatcatcgactactactgagccaactgattttgtccaatactatgaagcaacctctgcttcatcatcagtagcggcatcagttattgtctctaggaatgaagcaactactgctcattcatctcttatttcattgatgataacacttttagcgctcgttatataagcttgctgtcgcttatcacttttcacacttgtttttccattcttctttttacattcttcttcgtgcatataatcatttttgtataatatagattctcaacaataaactcctaataatcttctaatctacaatctactttgttcaattgataactaatgttaacatatcatatttacagttttgaatcaaatgaattatcaaaacatgaagaattattaactagaagttataaatcgtggttataatgtacctagattcaaatataatattattttatcatcaagaattaaaaactcaatcagggaagatttaatgattaaagtatccaaataaatcatatcttattttagctttcagtgataaagatgctaatattgatgaaactgataatgcatcaatagctcgtgagaaatttatacacactaataatggcttcgatttattaaatgatttatcagcatctaattgtattaattgataaatctgcaggtggtgaaaatgaattacattttccaattaatgcagaatctaaaattttaggtatgtgtgggactgaaacctcatgatccaggatatgaaataacatcatttgtttcattttatccacgtattggttcaaatattatagataaattagaaaaatttgctaaaacaagtattggtaatgaagaaatttgggttttagctatcagtgaacatgaactgagagaattatacgaaaaattcggatatgtctataagaaacaaagtactgattagctgtaacagctaataagtggtaggttgtttagatgagaaacttggaaaacgatatagaggcatcacaggatttccatctagatgttcttgttaaacagttataattgaaggagatatataaggtttaatgtgtaagattacgtaacataaatagaaattaaattggacgagaaatttcactggaaaaattcagtttttggacaatttcatacagtgaagtaaattattttaataattttaattattaaatgactgacacttttactattttcatttattttttaaattaatgctatttaaaaggtttttaaatactcttagaaagaaacctttaaagcaaaagattaagaagatgtcacaagctactaatactactactgaattctctagggaagctttagaatcagttcttaagagaagattcttctttgctccatcatttgaaatctatggtggtgtctcaggtttatacgattatggtccaccaggttgtgctttacaagcaaatattattgatacttggagaaaacattttgttcttgaagaagatatgcttgaagtcgattgtactatgcttacaccttatgaagttttgaaaacttctggtcatgttgataaatttgctgattggatgtgtagagatttaaagactggtgaaatttttagagctgatcatttagttgaagaagttattgaatcaagattaaagggtgataaagaagctagaggtattgttgcagaagttgaagaagaaagtgatgataaaaagaagagaaagaagaaagttaaagaaatcaaagcaattaaattagatgatgaagttgttgcagaatatgaaactattttagctaaaattgatggctattcaggtcctgaattaggtgaattaatgattaaacataatattggtaacccagcaactggtgaaaaattggaacaaccaattgaatttaatttaatgtttgaaaccgcaattggtccttcaggtcaattaaagggttatttaagaccagaaactgctcaaggtcaattcttaaattttaataaattattagattttaataatgaaagaatgccatttgcttctgcttcaattggtaaatcttttagaaatgaaatttctccaagatctggtttattaagagttagagaatttttaatggctgaaattgaacattttgttgatccaaataataaagttcatatgaatttcgattctgttaaagatttaaaaatttcattactttcaaaggaagttcaacaagaaggtaaaactgatattttagaaatttcaattggtgaagcagttgaaaagaaaattattgataatcaaactttaggttatttcattggtagaatttatttattcttaatgaaaattggtattaatccaactaaattaagatttagacaacatatgtcaaatgaaatggctcattatgctcaagattgttgggatgcagaattacaaacttcttatggttggattgaatgtgttggttgtgctgatagatctgcttatgatttatccgttcatgctgctaaaactaaggaaaaattatctgttaaggaagctttaaaggaacctgtctcaattgaagaatatgaatgtttaattgaaaagaaaaaatttggtccattatttagaaaagatgcaccaaaagttgaagaatggttaacttcaagaactcaatgtgaattagaaaatttagcaactgaattaaaggataaccttaaaatttctgctaaaattgatggtattgctactgaaactgttgaaattccatcagagttagttaaaattgaaaaaaataagaaaactgtttatgttagagaatatacaccaaatgttattgaaccatcatttggtattggtagaattatttattcagtttttgaacattgtttctggaaaagaccagaagattctgcaagagctgttttatcattcccaccattagttgcaccaactaaagttttagttgttccattaatgaataacaaagaacttcaagatgcaactcaaattgttaagaaaactttacgtcttgcacaaattccatttaaagttgatgattcaggtgcatcaattggtaaacgttatgcaagaaatgatgaattaggtactccatttggtattacagttgattatgatactattgctgatggttcagttactttaagagatagagattcaactactcaaaaacgtggttcattagatgatgttgttaaggcagttatggatattacttacaagggtgcttcttgggaagaaggtactaaacatcttactgttttcgaatctaagagtgatgaatgattcagtttgtgtacataattaagtaataataataattgataataataatactatatagttttttttccaaacaaataacagtgttaatgcaactaaatactcaatgtagtatcatccagcagaaagttagagtatgcatgttcaccccataaagaatattatacctaagggagaagcaaatctaaatttaaaattcgaaatttatttcgctgccatttctttttcaatttcaatttcaatttcagcttcgtttcaattttcaacattcgttcactgatgagtgcatgtcactttgaaggtttcttttgtttatctgttaaaatacttctctatttatcttatctatcttatcatctatcaagataagccagtcactcactcattcaattgaaaaactttctttttgtatcatatattagtaatggcaagtccttcacagcaagaaattcaagaaaatattgacggggcttcacttccacgccatagagccaccctcaacgtggatgctctcatttcagattctaatattaatgaaactagttctttaaataatgaaccaatactagaaaataaagatgctgctatgcttgtagaacatctgaataatcttaaaacttcaaaaggttgggatactacggatgaagatattacattagatgcagatgatttttcaaaacaagatattaatgaattgagtgaagagagaattaatatgccaaatttagataattcaagtgcttatactcctgaacctgttaaagaattacgagattttcaattctcaactccttcaatgctgaatcaaaactttgactcagattttgaagataataataatttagattctgtaaatagtcttaagaaaaatgatgattcaaaatcagaagtaaatacagataccgaatcaacatataatgaaaatgcaaataaatataaagtatcaccaatggttggtcatttcgaaggtaaaaatataaaagtaaatgatgatgatatgcaattattaacccctaagagacaacttctttatcaggataaaatagagaaacaatcagttgttgcaccatttgatataaatgatctcaaacttgatttatctaataaagaactaaaacctccatttgctactcctgctttacaatcatcagcttcatcagatcacgattttaattctataatagataactataatgtgttgtcatcaccaagttttgaatctccaactgattcatttaaaaagtctacctcttcaactccaactgaaaagccaataaaacaagtaaaggaaacttttaataaaggtcatacaagaactaattcaatacctcaagaaattaaaactagaccattgaaaacttcaattcaaagtaatgctccagaaaagaaaaagaaaggcagattatttagaggattatcgaaagcttttggtatgaattctggtagtcgttcatcacaacaggatctgaagatttccgctccaaagaatgtcattttgaaaactcatgttagttttgactctcaaactcaaacatttaaagatttaccatcagaatgggcaaaagttttaacagctcaaggaatttctgttgctgagcaacaagcaaatccagttgaagctaaagaagttttgaaattttactctgaagcatatggtttatctggtaaaggtagtgataagtttatggacgttcataatagatcctcaacaaatagtgatttagcagactataatccagattcttctcaagaatatacccaagatactatcaataatagtggctatcttaataataattcttttacaagtgagtcatcattatcaacattaaacaaacataataataataccaatgcaaatcttaacaaaactcctggttctgagtatgaaagttttgcaaattattccccaagtccgaatattagtgattcaaacattaataatgtttcacagaatacttccaatctggaagatgtcgaatacattcctaaaagacacgcaccaccaccaccacctcctacatcattagataatttctctaaatctccaactttacaattgaactccccatcaacacccgttttaatgtcatctaattcagtttcaaggaaaacttcattgtcaagacaagcatctttaaccaatgcacgtaaacattcatcaccaacatcatctaaacaagttctaaaaagtccatctgccaataatcgaagcacaccaaattctccttctacatcaataatggaatcattctccaaaagatttggtaaaaggagatcaggtactgtctcttcagataatcgtccaagaattgttcatttatctgaaggtatatcaaatccaggaggcccaattcagatatcctcaccagcacaagcaggcgctagcttgaatggaacattcttacaaaccaagggtaaattagcatctccagcattaatgaaacagttttcaatttcatcacctggtttaaataaaactggtggatccaacttttttgagccacatcgtgctccacctccgttacccggtaaaacaactagtatcattccatcagctgttgatacagcggttgtttcaaataataataatgagaatatcaatgagtttaataatgaaataccattatcatcttcatatgtctctcactcatcattgaaatcaccagttgaactttcaaataatgataagaattatttagattctatgaatgaagttagtgatgtcattcaagaggaaaatgatgaagttaatgaggatattcttaaaaacttgagtttacctacagataaaaatttaatatcaaaagttgatcaaagcttaccacctgttccagtttctgctgatgaaactaaagaaattaaaagagaaacagaaattgaagaagtaactaaagaagaaacaatcattgcaaatgaagaaggtcaagtcacgcatgagatctctgaagttaatgatgaggttaaaatcattacgacggctcctcctataccatctgtaccatctgcacaacccgtttcagcaccaaatgcatcttcaaagaaagaattaactgaagaagaacaagagagacgtcgtgaaattcgtcgtgctaaacatatcaaatacatgaaaaaattacgtgaaatttgttcagatagtgatccaaaggaaagatatcatgatttagttaaaattggtcaaggtgcatctggaggtgtttatacagctgttgatgatgtaacgaaggaacttgttgctatcaaacaaatggaattagaaaaacaaccaaagaaagaattaattattaatgaaattttagttatgaaaggttcaaaacatggtaatattgttaattttattgaatcatatttattgaaaaaagatttatgggttgttatggaatatatggaaggtggatcattaactgatattgtaacacatagtatgatgactgagggtcaaattggggcagtttgtcgtgaaactttaaaaggtttaagatttttacattctaaaggtattattcatcgtgatataaaatctgataatattttattatctttaaatggtgatattaaattaacagattttggattttgtgcacaaattaaggatcatgcatcaaaacgtaatacaatggttggtacaccatattggatggcacctgaaattgttaaaaagaaagcatatggaccaaaagttgatttatggtcacttggtattatgactattgaaatgattgaaggagaaccaccatatttaaatgaaactccattacgtgcattatttttaattacaactaatggtaaaccagaattaaaggatagagatagtctgagtccatcattacaagaatttcttgatttatgtcttgaagttaatcctgataatagagctaatagtgttcaactgttaaattccaaatttattttaaatgcatctgaaaataaagccttagcaccattagttcaattagctcgtgatgaaaagcaaaaagaatttgaagatgataataatgatgaagatgatgatttcgatggaaatgattgtgataatgataatgctgataaaggaactgaacgtcctcaaagtaaggatacattagatgcttttaataaaactaataacatctaatcagtaatctagattataattccctatgtatattgctttgtaaagaattagatagattgatatagattaatgttaatgatttgaatactatcttacaacatacgtcgatgagactgagagaaaaaatattttcttttattttaatttttggttatttaatgatagagaaattaaaatctgctcaaacgggtatgtgacccgaagagataatcacttttaaattatatttatatcaattgtttttcggttgaatagatcaaaagctgtatatcttttcagttggttattttgatatcattcatcggaaggaaaactattaatggctagaatttgaaaaaaaagaatattaaaaatggagaaaaatggaagtataaaagtttctaagggatataaaaagaggagtagaaatgggtgtacaagttgtaaaaagagtaaagttaagtgtgatgaaaaacatccctcttgtagcagatgtgaaagaagaggtacatattgttcatatcctttacctatatcatttgaaaaagtaaagtcgaaaaagaaggagcttaattgggaacaattatcagaaaaaaatggaagtgtcaataagtgtttcagattttccaatttatagcttatgaaaaaggttccaatgcaagtaagaatggtgaatttagtctaactagtaatatctcacagaaaaatgatgaagaaatcaagccggaggaaagaatacttgtggaaaaggaacaagtgaaggaaatagctaaaatcattaccgaccataacaacaaccataagagtatagacgagaaaaacgatgttgaaaacaactctaataccaacggagatgtaataagatcaaatatctttgaaattcaatcagaagatttaataattgatccaacattgacagaaatgtctgaaaaattaaacaatcctattctacattcaatacccaagtactccgatgctgaaaagaggaatgttgaagatgctatcgaactgcaaaacaagacgaaagctgcagatattttaagacagttaattaacgaaccaactcaaggtaaagtagatgttgatttttcaaaagttgttaagataaagcctactgcaaaagacgaatagaaaatttatatatattattcgtgtttattcaataatcattctgtatttttatagtgtttcaatataatcctctgtattatctctttatcattccattattgtattactttacaaaaatagtatacaccttaacatataatatacaaaattaaaaacaagtacaatcaataatcggattcaataactgaaccttccatatcacttgcagattctacaccaccaattacaatatatttggattgcacaaacatcattttagccatttcacttccagtattgaaaaattgataataattacccattggaatttcaaatgaacaacctttcgtcacaacaaatgtattcctactcaatgtaacctcaacatgaccagatataacataaaatataaaatatgtgtcatgatttgatttaactgcctttttagcacctgatggtaattctagtataccaccaccacaaaattcagagtcttgatcaaataatgtccccactttaaaatattcatcatcatttttgatcaatgttacgtttttataggaatcaggagcaaatgcaactgttcttcttatttgcttttcagtgccaggtccttcaaaaacagatatcgtaagcgctttatccttggagttcttccattcagttaatgtattattattttcatcactatcttcatcatcaattccctcatcatcaatatcttcatcatcagctgcatcaatatcagaatgaacagaatcgtcaccttgctcatcagcagataactctgtaaccgatgtttgtgtcttcactggttgcaatttttcaactgactttggtgttttatcacgttttgtggtcttgactggtttagatgatttggatggttttgttgcaacagttttttgtttctttctatgattggtttcctcttcctgtagtttcctcttctctacttttgaaacagcaacaggactagtctttttgtttaaagtttttacactcttagaaacaatttctttaggtttagatttgattgatttaggttttgaaacagattttttgaatttaggcttcattatctgataaatctatggattctgtatgtttggcaataccacgttttttagattgggagaaggattgcacacctaaagtattatctggtctatgtaacacattatcaacagatttgactataacaccattgattttttctgttttataaacaactttttcatttttccaacttgcaataggagctatacgtgttcttgttgaacgacgaattggtgatgcatgtggttttggtaattgtgcctttttagcttgtgttttgataggtttttttttctcagttggaacaactagtttagaaacttttgctgttttaactggagtttttttcattggtgaattagggagcagattctttctctattaaatgtttcgatatgttgacatcattttcatcatcattatcactggcactctccacgacacgtctggttattggtacagtttcaattgttttgatatcatcatcagattcatcagtcgattcatcagaaagttccccagtattttcagaggatccaccatcactgttttctttatccttactggctggagtcatctctttctcagcttcattatcactctcactactactttcatcaagttgatacatcaagaacaggagcaacatatttagtagcagcttttctgggggttctactttttctagatgttacactatcaaaattcttttgatcttcctttgaagcaacttttgcaaaaatttcattagctgtgacttcctttattttgaaaatcttaccttttttagcagactctgtagttttagattttcttggagtaggagttggtgttgataatgaagtttctgtagttgaaaaattctacgtttaattttttaatgttgacactagaagtttgagcttttggagttttttgtttttctattggatattcttctttattattttgttcttcttcttcaattcggatgcttttttcacttgtattgttttcaacttcaatcttttgaaccttttcttcaacaatgaaatcatctttcttgttaccaacaactttcgattcagattgattggaaattacgtctatattgtcactactttttcttttatcttcaacagtcaggtcatcttttttgttatcagtttctttttctaaagcattttcctcttgatcattatttgttgagtcaactttaggtacgacatctggttcagcattgttacttttcggagttgtatcttcatctgctgatttttggacatccttcacctctgattctaatttttctggtgactgatgaacaactttgtcgctttcttcagatgaagcatttactatattttggggttgaaatttggaattcttggtaaacttatttaatgcgatattctttgttaatttgatgccatttgacgtattaccagatatagcggtagtcgattccattgattttaattcttcttcgaagggagatgatgataaaattggaacattggatttgttcttcgttggtgttactggagtctcaatataacttgtgtttttcgaatttgaatttgaattgatagtattttcaacaatatcagtgacagtttcaaaatgtgatggagacttagttgatataggctgatcgttttcattacttggagtattctcttcaattaaagcattttgttttggagatttattttggttttcaatattttttaattgatcaaaacgcattgataatcttttctttggagaggttgcattgtttagctcagttgattcaaattcctcatctgaaagaaagaattcttttggatcttctaatccattgggtcccctctttggtgtccaagttacttggaaacctgtcttccttcccacttttggttgactcaaaaaagagtcagctttttctatagccactcattatttcaaacctttgctattgaatattcttttattatttatccagatatcaaacggtagcagaatttccaaaaaatacctaaaaatgcatccaccaagtgccttgtaagagattggtttaatttatttaaaaaaccacgattaattgaattggcaccaaacttttctctgaaacgcgaaaaaagcaaaatgatatctgggatactggcgttgccggtgttaagcggtgataatgtaaacggtttgattacttttattactattaactatttagaaattacaatacaaatataatatgaactcagttatcttctttagcaactgcgacaacttcgttggtttcaccatcatggtaagcgtaaactttaactttgaaattagcacatgcaacaccaaaagttttaagaattaaagcttgagtaacatcaagaacttgaccttcttcaacaactttatatggttcagttaatgtaattttaccttgtaccattttagttggaagcttgaatttgtttcttaaagttggttccattgaatgtgacatagtaacatcttcttcaattggaatttgtccacctcttgaatatacaacaccttcaggtaaaacaaacgttattggagatcttgatttagctcttgcataatcttttctttcatatgaatcaaaatattcattgacagtttctggagtttcatcagtaagtaataaaccaattaatccatttccgaatcttgataatttatgtaaatcatttttatattcttcttcaggagactgtcctaacgctttttgtaaaactttctttttacctaaggatgagtttggatcctacccaatctttacgaatatcttgtaaaacaggagttctaacatcatctaaaccaagcatgtatgtatatttgtaagtatcgagaccttctctgatttcatcaaaaattctttctttattttctctacctttactatcggtttgtgcaagggtaacaagcttacttctctttgatctaggcattgtaatgtattatattgatattgattgaagatcaatcaaaagattcattaaattccacttgaaaagaaagataaaaaaattttcagactttttagttaaaaaaaaaaaatctgtgaaaattcaaaaatctaaaaaaattggaaaaaaaataaaaattacgtaacgaagctttcctcattgggaagcagtttcactttatcgagagggcaaaaggagtagatgagcatttgtttgacaattctggcttgtttcttcttaaaataaccttcattaactgcatttctttaattaatcaaccatttatatttaagggatcagaagttgatgaaaaaaattatgaaaaaaaatacagatttcgttgaatttgagacagagaaagatgtcgaatcgacaaatgctcattctgataatgattttaaagaatcatctctcaatgataatgttggtaatggttactgatgaaaacgaagatgattatgaaaatgaagatgaggagtctgcacttcaaagacttacagggaactataggaaattttcagaaactcgaagatctagagaaatgatagctttgttaaatcctgaagaggaggaatccgttgaacaaaatgtcgaaatctcaaccaggaatttaaacccctataatggtttaatggattcagattctaatgaaagtgatcatgaagattatgaagaatttggagatatggataataatcataatgatgaagataaaaatgataacaattatgataatgatgaagctagtagaggtgactcattggaatctgatgaaattgaagctgattctgcacttagaatgttagagagtgctttaagtgcttcaagatcttcaaaccctttagaagcctttagtgggtttttcaataacagaaataccaacagctctgatacaattgattcatcatcttcagttgtcgattcaagtagagaaagaaatagaaatattataaactcattcatggatcattttggatcttcttcaaactctgaaattaccggtttgatgaatggattgaaaactcataatgatccttatatgatcatggaaactcttaaccaactttccacatctttattaatgatgtcaagtctgcaatctgaacgtcaagttccaacttataaacttgctaaaatacttgtggatacaattaattcatatccagatcatcttgaattacaattagtagcttgcagatgtatctataatcttacagaagtgaactttaatttgattaatgagattgtctcagctggtgttgttgaatgcttaaatcaaaaactggctgatttgagctatatagatatggcagaacaagcattacaagcactggaaatgatttctagaaaatgtggactacaatgtttgaaaaaaggatcaatacctattgctttatcatatttagatttttttaccattcatgctcaaagaaaagctttaaaaattgcttccaattctactagtttcaaatatattccaggtacttgtttcaatgacatttcaaccattttgccaactattaaaaatgtctcaattaattattcagatagtcaatgtgttgaatattcttggattttcttatcaaatgttattaataatttttatgataatcctattttaatcgatttacttgatgccgattttatgaaacaattgttcacaaaatttgctccatttacgaacaataataaacagtcatcaggcttagtttcattcaaaacatcactcgcattacttgattcattaacattgttatcatccgagtctcctaaattttcaaatgagttattactaaaatgcgatgttccttcaatgataacctccacattttcatcatatgaaaacgaagaatccaccaatacaagtatggatgaatcaaccaatacacaagaaatcgtttcaattgacgcacttttaaattgtccaaagagtttgatattgtctattttaaagtttatttcaactttgatacctctggctagtgagtttaatattactgatagttcagacattggaaattatttcagtatgaatgaaaaggatttgaatataaatgatacaaaatttgatttgttaaacaacggcgataacagcaaaaaagtattgaataatttttttactactgtttatcctgtcattctgaatgtatacgatgcaactgttgattataaaactagaagattagtttttgtcttaattattcgtctcatttttttaatgaacaaaaatcaacttgaatcaataatttgttcctcgaaaacttcattgatattggcatcatctattacccacggtaaaaaaattgttgataaaaaggacaaccaaaccataaaatcatatactctattatttggtgctatattcattactaaaaagttaatggagttggattctgaacttttaaccaagtatttaagtagagaaggaatgtttactcaactggataacttgagtacaaacattaaaaatgaaattagtaaattaactcacaaggataacgatggcgatatcgaacttgagtacgacgataggaatagtagtaacgatgatgatgataataattcatacgatcaagaatatgatgaagaagatcctgatgatgatatgatggaagaggaaactagctttttcaatacagttagaaaggtaaatgttttggaattgagtattatgaatgatggtttatctaaacaatctaccaaaaccattttgaacagcctttacgcatcattgaaaccattaacatctgaaaataaagcttccataacagatgaatcaaattatttatatttgttcatggaacatttagagaagtgtttagttgaagaaagttctgagttatctaaagaagaatgggataatatatggtcacaatttgctagtatattagaccgtaaaagaaatccaaattcattgtcaacatatggattggttatatcaggaataattgatcatttactagaaagattcgaaaaggagaagaatcatgaaactgcatgtttgatatcattcaagtatattttttgctcagcattgagtccgtgtatcgttcaaatggagtctccactttatttcttagtcaaaattctagaagatgcattagatagaaatgaaacatttgaaatatttggagcagatttggatgctaatcaaaccataagagcaaaggctacaatgatgagtcgtcaaatgaaagttaatttgatcccttatgatgcagtcccatcaacatatgttaaaactgtcacactttctgttccagcaattggtacattcgatacaattcaaagattttttgatagctctaaatctattagcttgaggtctaaaatgaatggagctcctttaagtgacgatgaacaacattttgagttttacatgaaagatgttaaggtacctaccgaatcaaccatctttggtgctgtctataaatattcaggtgatggattccaaaatatgaaagttgcaaaggaagttattttaagaaaaatatacaatgtcaaatataaagttgttgatggaaagtacaaacctaatgaaggtattatttccaatgaatcgcttgatgataccattaatagaattggagatccagaaattagttcaattttattattactcaaatcattgcattcaataaatgcaacagtccccaatccaagtacatcagaaattgcatttttaaactacaaattgattgcaaaacttaattgtcaagctggatgatccattattagttgcaagcgatatattaccagattgggcctcaattatacctagagagtttccttttctttttccaattgaaacaagattgtcatttttaaaatctacatcttttgggtattcaaggctaatcgattattggtcaaataaagctaaagagagtagttcaaattctgactgaacaatccgaagccaatgaatttttacgtagaagtttaacccgtggaagatctgcaagacataagttgagagttcaaagagacaagatttttgcgagtgccattaaaacaatggaagtttatggttcaaatcctggtttaatagaaattgaattttttgatgaatgtgggtcaggtttaggtccaactttggaattttattcggaagtatcaagagaatttagcaagcttaatttgaatatatggagaagtggagattaccataaactcgagaagctaagtattgaagaacaagataaaatgtatgttaaagaggttcatggtcttttccctaaaccaactacaaaaagtgatccacattatgttaaggcaattatactattttaaaatactaggtaaatttttagcaagatcatttttagattctagattagttgatttccatttcaatccactattttttgaacttgctatggattactgtttgacaaagaattttaaatttacccaggaagtgtctatagagaaaatatcagaaattgatccaaatcttgcagcttcattaaatcatttgaaattatatcttgaagagtttaaacatttaccaaaagaacaacacgaaaatgtgaaaatatcagatgcaactatatcagatttaatgttaacatttgttttaccagggtactgaaaatataaaattgttacccaatggggatgaaatatcagttacaagtgaaaatatatctcagtacattgatttaattgttgattatacaatttataatggtatttctgatcctattaagtcttttgttgaaggattttctgaaattcttccatttaaatcattgaaactattttcaccaaatgaaattacaagacttactggtaacgaagttgaaaactggtccacagaagttcttatctctgttattcatgctgatcatggttacaatagtgagtcacaacaaattaaatggttaattgaaataatgtcaaaatttgatgttgatcaaagaagaaactttttgaaatttgtcactggatctccaagattaccacatgatggatttgccggactatcaccaactttaacagttgttttaaaacattgtgaagacgatctaaaacctgaagattacttaccaagtgttatgacatgtgcaaattatcttaaattaccatgttattctacatatgatgtcatgtattcaagaattatacaaggctatgactgaaggcaatggcgcattccatctttcatgattatttatatatcaatagaaatactatatagttcaccaatttaaataaagtcattaatctctaatttattgtttaagttcaactaaagttgagccatcacatcagccgtaatttcaattttttaaaattataaaaaagtggctggtgaactacatgtaatttgagtcaaatatatcattgttaatgtacaacgtaaaaataatttaaaactaaatgtaaataaatataaaataaaaactattataatgagttaaataaccaaaaaataattacaataaaataagacacatatcattaacagaaaaaaaactgtaatttgcaaaaaaagatgaaattaattaattcttcttattgatccatctttgtaattcatcattagcagcatctcttttagcttttcaaaatttcccatttattttttgcttgctcttgtgcctcttcagattgtgcctttgtccatcttaaccaacttgcttgagtcgcatcatattctttctttgcttttctgacttcatcatcataatattgaactgcttgttctgcaacttcttgagaatgtgcactgaaaatacctaatgaattccacatatgattgtaattatcaactataaagtttttagtatttgcacttgcacgagaaatccagtcttttgcaccttcgatataattatttgcatgatcacctatttcttcagcaccatcattcaatttattctttgcatattgtgcattatcctttatgttctcgttagcttgtttacctgctttaactgcatcatcctttgcaccgacgacgtaatctttaagataatgtgcatcatcttgaattttatccttagtatctgcacctgcttgaacaactctatctttaacatcaccggcaacatcatgtgcatattgagcgttatcataaatcttatccttagcatcataacctgcttgtacaactttatcctttgcaccagcagcttgatgttttaaatattcagcattgtcttcaactgcatcctttgcattgtaacctgcttgaacaacattatctttagcatcttctgcatatcctttaacataattagcatgttcaccaactttatccttagcatatcttgcattttgattaatttgatccttagcatcatagccggcttgaaccgcactatccttaacaccagcagcataatgttttgcatattcagcattatcttcaatattttctttagcattataaccagcttgaacagcactatccttaacaccagcagcataatgtttagcatattctgcattttcattaattttatcattggcatcataaccagcttgaacaactctatccttagcacctgcagcgtaatgctttgcatactctgcattatcttgaatattttcctttaaatcaccacctacatgagcagcataatttttagcatcatgtgcatgtctataagcttgatctttaacttgagcacctttctttgaaatatcatgaccaacattagctgctttatcattaattttatttaaatgtttaccagcttcatcacctaattcattaataatatcctttgcttgattaccagtttgggatagataagtctgccaattgatcaattgcattatcattctttgccttaaaaaaattatattttgcttgtgctctatcttgaatttcttgagattgagcatttctccaatgtaaccaagaagatttagtttgatcccattcctttttagaatcttcaacttgtttcttataataaactaaattttctcttaaagtatcttcagcattaccacctaattgattatatttatcaccgatataatcttgtgctttaccataagtatctttaatactaccagtaataccatcccagtaagaagaatcggaacctgtaatataatcatttaatgaatcctttaatgaattcatatgctttttagcttcatcatatttttcttgtaattgtttatcaccacttgaagcccaaaataaaccttttttacccttacttgaatctaaattttcctttgcttgttggagacttttataagcatcatcataaattgacattgcattacgtgaagcctcagaaccaaaactttgaacctttttcttcagatcatcaatattatgttccaaaggtttttgaccattattaatattatttgttgcaatgtaaatattattaccattttcattaattccacgttcattaggttgtgcaacataagcctttggaggttctgaatctgcaattactttaactgcatacaaacctgcagctcctataactatagttttaaacattctgcttgttgataacatattatagaagtcaaaataaattaaaaaatcttttctgttactttgggaaaagaagtacgatagaggaggatatacaattacttataaacaaagtaccttaccttattatactctaacaattgtacaagagatgggacaggaatggtcagtacctgatataagttgaggtaccattggggaagaaaaaatttgaatttcctcggaagctgagccgttccctccgaactgaccctttgattgagtgatggggacttgcttgagtagatgtatcacagcttcttagttggtgccattgcagtccatgtgggtgtggtagtagtagtaggtatagtagtagtagtattagtagtattagtagtattattagtgttagtagaagtagtactattagtactggtattttcattgtaaatagtgtttaaaacttttggctttgttggaacaattggtgaaaatttatgttcctttggcattgtgggactggatgaattaacaataggggtagtagtagttgttgttgatgatgatgatgctgtagtattactttcacctatgtatcatattagttgattttctaggtggtggtggtggtggtaatgatcccgatctggaaagtgttggtgtccataacttgaaatgatgataaacttggattattacttgtattagattctatttgagtatttgatagttgtgatgatgatggtggtggtggtttgcgtgtaggtaattttggtggtgtgtttgtattactagtatttgtagaaattgtagattccattatatttgatggtgttaaacctggtattaacatatttttagtctcttgtgcattgtaaactggtggaattgatcttttaggtaatggaggtgaaattgtagttgaagtatctaaatcaatcagatttgaagatgttgatgatgatgtatttgtcgttgtagttgatgatgatggtgatgaactaactgcatcatttaaatcaataaaattatttgaatttgatttagattttaattttgaattattgttaaaagaatttttcaatttattaattaaatcagtccttaatttgttcatcaataattttaacttttgaattgaaaatattataaactggtctatgatcagaaaatttaataattgatgcaatattataatctaatgaatttaagtttttacccttaaataaaattctatcagtataagcaggtactctctgcttttcacttgaatcataattatttgaatttttatcaaatttataagttggtaaaaatgtaatttctgattctttgaaaaatttaaattctttaactcttaataattgaattgataattgatcccttaataataaattattaatatcatttttttcaattaataatctaactttttcatttggtaatgaaattctataatttaaatcaccaagccaaattatattatcatgatttttaataaatttatttcttgaaaatctaattccattgaaactattaataaaatcattatttctttcatcagtatattgtaaacctgaagttaaatgagaatttacaaaacaaaaagaagttgaacaaaatttaaatctaattgcaactgtacccttatttgcagttataccacctaaaccagttttctttgatttaccttcaacttctgtaacctttgaaacatgatttgatttaacgaataataataataagattgatgacataaattctgatcttaataaaatataattatcatttgtattatttttaattgttctctcaacttcatttgtccaataatcaccaatagaactatcatttttcaaaatatttgaagcattaagttcaattacttcttgaaatccaacaatgaaaatatcaggattaaaattttcataaggaaacaaccaatcagttaaatttttattttgatttgcaccagctaaattaaatgtacctgtaaagattgttatattatcatatgaagtaaaatttgattcataatttttcaaattttcattaatataatcaataatcggatcataaattataacttgattttgtgatgaaattttacctaataaagtatcagtaatttgttgtttatttttatcaacaaaattattaatataaattctactaattgatttagttgcatcagataaagcacctgcaaatcccattttaccacttcttgaaaaacttgatttaagagcatttgtacctgtataaatttgactaattctatcaccatgatttgcccaaagtgtattatgtttagtttttaaatcattattataattgatgtgatttgaatttaaataattaattaaaacatttaatgaaataacttgttgaattagattagttctatcaagacaatctaaacaattagttctaaaagtaccaatttgttcatttaataattgattagttttcaaatcatagaggaaataaccaaaatcattgaaagaatccattaaataaggtaataatttagttgcatcagcataagttttagaagtttcttgatggaaatcaaaattagtgaaaaatattgaatttgaataagaattatcattatttttattaattaaagctttataatgatttagataagttttacttaattcaatttctgaagatcttgtatttgataataaattaacgatatgaatgggtccatattttgcaattgaattttggaaatgtttttcaaaagttggttgagttgcatcaaaacttctagtaatttgaactttaggtgatataagtgcagtatcttgttcccaaaaaattggaattgaacctctaatttgagtaaatgcaaaaatcttcatattataattatcattgaaaattaattcagtttcaacataatttgcaacattaccatcatcatcaacaccacgaacattaaatctagtacctgctcttttccaagattgttttgatataattgtaatttgataattatttgatgataaagtttcagcaaaacctctaataacagttgttaagaaatgattattatctaatgataatttatcagattgagttaaattatttcctaaaattaattataccattcatcataaaatcattccacatataatcagtgtgatattgatccattgaaagtctttgtttgaatattaatacctcttgattgtaaagttgaagttaggatcaaaatctgaactatagaagaatgaaccatctgataataatttacgtaattcccaacaaggatgttgaggtattctttgaagaagatcattttgagatggtgaagataaagatgaggatgaagatggagatagagaagatgatggtgaagatctagtagtagcagcagcatttgaaggagaggaagaggaagaagtttgattgatcattttcaatatttggataaccatttgaatttaaatctataaaatcccaaatatcattagttaaagaataaaattcgacatcttgaattttatttatattttcaccttttaaaggttgagcagtttgaattttagaagtaataatacaaaggaatatatcattattcatttcaattaaacctaagaaaccataatttttagatcttgataattgtttataagaatttgaaataaatgaatttttatcaattaattcaattgcacatttaccagttgattcaataaatctaaacaagagcacatgagaatgtgacactagtgccaaagttctcctacgaccattacacaccaatatatgcataccaatatgtactttagaaagaagaagaagaagaagaagaagtagaagtagaagaagatacaatgactagatacactcgcactatataaaattatagagggtctctctcctattctcagaacagtatttgcttactcttctcatatacaaggaatgttatacaggtagctggtacaactcttaatagattggctggtaatcccttatatatggctagtataccctctcgtcgtattatattgacggttaagcgggattattgaataatttggtggatttgtagttaatatctgtaatcttgatctaatcatctgtaatggatagaatatactggttgataacatctttgatattgaactgctataaacatattgtaattgtagttaatgatttattactgttaccatcattatcatcatcattatcattatcattatcactaatttgtcttttcaagagatcataaatggataattgaactgcaccctgtgcaacattaaataatgcaggtactaaacctctatagaaaccttttaaaccttcattttcataaatatttgatataccattaataattgatttataagcattaggtgatgatctatcaattgcaatcattctagtcttaataacccatataggattagtcaatatagatgttgaccaacctgctaaaaatgctgataataaataattataatgttttaaatgtttatcatcattacttttattaattattaataaatttaaatctttaaattgtctgtacatgtaaaaatataatgcccatgctgatgttgatccaataagattgggacctatcccacgatagatattctgtataaatttataatatgataattgtccattgttattactactcgatgaaactagttgattgtaaattttcttaaatgcagttaattgatttggtgatgaagtgtctaattgcagtcttaatttaaagaagtccagtggatgagtgagcagagtagttgagaatcctgcacataatcctgccactgcctctactctatttctatccattatatatatttctgtcttaagtgtgtattatataccaagacttaatgtataattgactctgacccatagtaatagtaatagtaatagtaatagaaaattacttagtgaaaaaaatttaaatttttcacattccactaatttaatttaattatggacaatttgtattgtttgtatagttattactggttgcttcttttcttctgtgataattaggtttattactttaaccctcccttcagtaaacaatgtcaccacaatttaaaagattaaagttagaattactcaaacctgttccttcagattttgaaatttctcgtaatcaagttccaaaacatattactgatgttgcaattgaatcaggtattgttgaatcagaattagaaccttatggatcttataaggcaaaggttaaattagatgtcttagatagattacaagatagaaatgatggtaaatatattttagttgcaggtattacaccaactccattaggtgaaggtaaatcaacaacaactgttggtttagctcaagcaattggtgcagttttaaataaaacttgttttgctaatgttagacaaccttcaatgggtccaacttttggtgttaaaggtggtgctgcaggtggtggttattctcaagttataccaatggatgaatttaatatgcatattactggtgatattcatgcagttggtatggcaaataatttattagctgctgctttagatacaagaatgtttcatgaagcaactcaaagtgatattggtttatttaaaagattatgtccaattaaaaaagatggttcaagagatattccaattggtttaacttatagaattaaaaagttaggtttagatattaataaaattaatgattggacaaatgaagaaattagtaaatttgttagattagatattgatccaaagacaattacttggaaaagagttttagatttaaatgatagatcattaagaggtgtttccattaatgaagcaccaactgaaaaaggtttaattagaaaaacaggttttgatattacagttgcaagtgaagttatggcaattttagcattatcaaattctcttaaagatatgagagaaagatttggtaaaattgttgttgcatcaagtaaaaatggtgatccagttacttgtgaagatttaggttgtgcaggtgcattaactgcaattatgaaagatgcaattaaaccaaatttaatgcaaactttagaaggtacaccagttttcgttcatgcaggtccatttgcaaatatttcaattggtgcatcatcaattttagctgataaaattgcattaaaattagctggtacttcaaaatctttaacaaatgatgaacaaattaaggaacaacaaggttatgttgttactgaagcaggttttgattttacaatgggtggtgaaagattccttaatattaaatgtcgtacaagtggtttaaaaccaaatgttattgttattgttgcaactgttagagcattaaaagttcatggtggtggatctgatgttaaacctggtcaaccattaccatttgaatatacaaagtgaaaatttagaaatgtcagaattaggttgtattaatttacaaaaacatatttctaatgcattaaaatataatgttgatgtaattgttgcaattaataaaatgtcaagtgatacagctgcagaacatgaaattattaaaagaaaatcaattgaagcaggtgcaactgatgcaattatttcaaatcattgggaagaaggtggtgaaggtgcaaaagaattagcattaggtgttattaaatgtgctaataaagaatatgaatcacaagatttaactaaagaatttagtccattatataaattagaaggtacaattgaagaaaaaattgaaaaaattgcaagagaaatgtatggtgcaggtagtgtttcatttagtgatgttgctaaagagaaaattgctgaatatacaagacaaggatttaataaattaccaatttgtattgctaagacacaatattctttaagtcatgatgcaaaattaaagggtgtaccaacaggatttgaattcccaattaaagatattaaggcaagtattggagcaggttatttatatgcattagcagatcaaattatgacaattccaggtttagcaactaaatgtggatttatgaatgttgaagttaatgatgatggtgaaattgaaggtttattctagtatatgaatgaatgtatctatctttatttactatctatataatctataaacaatttattttttatttatttattcagttattttatcattattgttattatttttgttatgattgttattatgattgttattagaaaagtttcgactattcctatttttagaattaattctttgtttatagtcgttaaatgtcatattagcaaaatcatcttgatttaatgatttactatatgaatttttattatttgaatgagagttagagttggaatgagagtttgaatttgaatgagagtttgaatgagagtttgaatttgagttattgctgaatgatctacgattgtattttttattattagagttggaatttgaattgttactgttattattattgttattattattataattataattcatactattacgttttttcttattattggtatcatttgatgaattatattgagattgtgataatgaaggagttgaaggtaatgaaggaggattagatgatgatgatattggacctgaaacaggaacaggaacaggacttggagaaggtgaaaattttctcttttcagagataagtggagaatttgattgagaatttggttgagatttaattgatatatctctaagtttattaaattctttcaaatgagttgaatcattattatttttcaattttaataaaacatcttcatttctattaagatcttttaaaatatcttcacattgatctaaaacgattgaagttgataaaccatgatcttttagttgcattagttaaagttaataaataattattaattttattatatttttgattatataattcatctaatcttttagaatttttcaataaaatattaaaatttgattgaatttcaggttgatttgattttaaatttgataaatttaattgtaaattatcaactgtattattaataaaatttggtaattgaatttgtaaattattaattttagtattaatatcatttttataattaatgaaagaagattgtaacatatcataggaatgtgataatctttcattttcatttgataaattaaaattttcaattttcaaagatttaatatttgattttagtgaatcattttcaaattttgaagtatggaaatctgaagagatattaagtaattgagattctagatctataactctacgttctttccttttaagtaaagattcagcaacatcagcttgatgttttgcatttgataattgttctaacattgtttcatttcttttacgtaagatttcatatttatgttttgtctctgatagggttgatttagattctgccaattgaatagtgagatcatcgatagttgaatgaagagcatcaatagctctagaagttgatgacatgattagagtatagtatagtaattactagaaagcacagaatatatacaataaatataagaaatgaccgttgtaatagtaatagtaaacaaagagagagaaatgaccacagtgagaaatttcaaagtgaggagatttttattattataaggaaggaagtttattatataaggaaggttttatcagcttttattctattatcttatctattctctttcttcaatggacttgtttgaaagaaatgtacagtgtgagagtgtgtctcgtcatttggatgagaatgtcacctctcccgtgttagactctgctgtggaaatgttatcttctgataataattttaattcaactgatttagtagaagtaccacattcaactccgtgtattcaaattatttagatcattatcacatcatgatttaccaccgatgatcaatccaagggtaagatcgaaatcagttaatgtattatctccaaagaggaaatcaataagtttttattcttatcttgatttagttaattatgaaaaaatggagaatattagtcctaatactagtcctagtactaatattagtattaatactaatacttttgcaaatccaattttaccaaaactacagagaagatcgactattcaagggatagcggaggatagagagacgagtattgatgaagaactggatggtaagaataataataataataataacaaaaataagactaataagatcaagatagtgaataactttaacaaactaatgataaatgaattctatagatccaatggatatggaaccaattgaaagcacaacaacggatgatgaatcaatacaaagctggaatcctgatactgacagatcagtattttgaagatgatctagagataaccagtactaataccaataataccaatactaccaatactaccaatactactacatcctccctactactaccaccactactacacgtctgttcagcccacgattacctccatctacgtacaagagaactaagaaacagctttgtaggcagtcgtcctaagcagtaataaattccaataatcattttcctcactttaaatttttcacttcttctttatacctcttttcactttcctttatatattatataccactactttcttcttaatttactacgggaaataacaaccattatgtctgataatgatcttgatcatcatatcgaacatattgatgaacatacagatgatcatacggatctcataacttcaaataattcaaatatcccatcttgtgcctattgttctatttcaaatcctaaatgtttagctaaatgtgaaatttgtaataaatggttttgtaatggtaaatcaaattcaaattcttcaaataaaggttctcatataataactcatgcagtactttcaaaacataattcaatttctttacatccagattcagatttaggtgattcaactttagaatgttataattgtggtaataaaaatattttcgtacttggtttcgtatctgctaaaattgaaaatgttattgttatactttgtagattaccttgttctcaacaaaaggatgaaaattgggatactaatcaatggcaatccttaattgaagatagaatcttattaccttggattgttaatataccaaatacttcaaatattaatatatcaattgatcaaattaataaattagaatctttatggagattaaataaaaattcaactttatctgatttagaaaataattctacaaattaagtaattcaattgaagatattaaagttgatccaatcttaatgcgttatactgatgcttatcaatatcaaagatcttttgctcccttagttaaaattgaatctgattatgataaagctttaaaagaaagtaaaggtttgaattatatttcaattgattggtcaaaatctcttaataataaaaatttagcttctttctatttttcaacaattgattcctcagaattaaaagtttcaattggtgatgaaatgttattaaaatatgatggtcctgaagttgatactccttgggttggtaaaggttatattattaaattacctgattctcgtcaagaaacttatactttggaaatggatccatattattttccatgaagaattagatgagaatggtactgaatctaataatacaagacacaatcatcataataagaaattaattgaacctccattacatgttaataatagatttacctgctgaatttgtttggaaaggtatctcctatgaaagaatgcaagatgcaatgaaaacttttgcacttgattctacttcaatttcagattatttatataataaaatcttaggtttagaaattattaatgaaaatgatgttaaatttaatattaatttaccaaatgatttatcaattccaaatatgccctcattaaatgattctcaattatttgcagttaaaaatgcaattcaatcaccatttactttaattcaaggtcctccaggtactggtaaaactgttacatctgcaacaattatttatcatttaaataaattatatccaaatgaaaaaatacttgtctgtgctccttcaaatgttgcagttgatcatttaactgaaaaattatctaatatgggtttaaatgttacaagattattagctaaaagtaaagaagatattagattcatcaattttgaaaaattctcttaatgaaaaaattaaattaaatgcaaataatgttttatcaaaattattaaaattaaaagattcaattggtgaattaaatgataaagattcttcaacttatttcaatcaatttaaaaaattagaaaataaaattttaaaaaattcagatataatttgttgtacttgtataagtgcaaaggataaaagattagataaatttaaatttagatcagtattaattgatgaatcaactcaatcttcagaacctgaatctttaattccaattgttaaaggttgtaaacaattaattttagttggtgatcatcaacaattaggtccagttattttaaataaaaatgcaagtgatgcaggtttaagacaatcattatttgaaagaatgattatattaggtaattcaccaattagattagaagttcaatatcgtatgcatccatgtttaagtgaattcccaagtaatatgttttatgatggttcattacaaaatggtattacaaatgaagatagattaattttaaattcaaatttcccttggccaattaataatttaccaatgatgttttgggcaatttatggtagggaagaaatttcaatgtcaggtacttcatatattaatagaattgaagcaattaatgttgaaaaaattttattaaaattatttaaagatggtattaaaccttcacaaattggtattataactccttatgaaggtcaaagaaattatattttacaatatattcaaatgaattcaaatttaaaggatagagaaaaatttttagaaattgaaattgtttcagttgatgctttccaaggtcgtgaaaaagattatattatactttcatgtgttagagcaaattctcaacaattaattggatttttacgtgatcctcgtcgtttaaatgttgcacttactagggcaaaatatggtttaatgattttaggtaatccaaaagtacttaataaggataaactttggaataatttattaaaattttatcgtagtaaaggttgtttagttgaaggtcaattagataatttacaattatcatcagttcaattatcaagaattaatgaaaataataatagtgataatagtaataataataataaaaattcaacatcaaataataatggtcgaaaatttaataaatcatcagttattgaaagtgatactcaatcattaatttcttatgaaggttcaaattttacaaataatagtaaatggccttcattgaatgattgttatgatgataggaatgatttaattaaagattcaaatcttgaagaaaatattaaaaaattaactcaacaatttggtaatgatatagttttctaatcttaatcttaatcttaatattatattttgtattttatattgtatataatttctataaaaaattgttctttttaaaaaaataaagtcattgaattgaattttcgcttttttattttcattaatcgtttattttacattaatcgttttctttttgttgtcattattcattagaatctcctctacgaaattcttcactgtctccattatctaaaataattgcattacttgcctttggtggttcatcaagtttaatattttccataacttccttactacttaatcctaaatgtaaattattttcatcattattctctaatacttcaccttcattctcattttcattttcagttacatcattttcaacattagtatcctcaatttcatttggattacctaaaactttattatacattgaactaatctctcttaattcattattaacaaaatttaaccatggttggaaattacccttattttcaaaaatacattcataaagttcattaaatataaaatatgaacttttcaaataaaatggtcttatattatcttcaatttctttatgtaatccaaatgcattctcattctttgttgcaccaaaattttcaacataactttgaaatttatgaatttcttctgcaattaatgttaaatgacccatataaccatatctaaaatttgtcctttcatacatttcatttgataatttataacaataaattataaataatgataaattaaagtatcctggataatttaaattattacatttataatcaatttcatcaattgtttcaaaattatcaaattctccaaataatgaccaaattaaaattttatttaaacttaaattatcatcaaaaattgtctcttcttgattaattgctctatcttcatcccaatttgctaatctaccattaaaaatttgttgaattaaatcaaatataacattatgcatgaaattattccatggaaatttgactaattttagtgtaattaatggtattgcatttgttttcaataattgatatttgaaaaaattaccaattgataaatctaatggtaatttaatatatttagagttatttaattttaattcattattttgatcattatttggatttggattttcgttaattattaatgcattaattgcatcattcattaattgttcagtatttttcgtatctcttaatgaatctctttgacagattaattcatctaatttaattgatttattcattaatatcatgtttgaacaatgtaataattcagcaattaattccattattttaaatctttcatatcctaaaggttcaatagtttcgccaattgaacttttcagttttttggtggaatttaaattacattttctttcataaaatttatttgtaagataagtttcagtaattttatctaaattaagtgaaaataattttaataaattaccaagatagattggatctcttgaacttggcatatttttagatggaatagaattatccctttctttatcgtcttctaatttattactgtctttttgtgtttcattttcattttcatcttcatcttctttttgtttttcattaattgtttcattattgtcgttatcattattattattaatgtcattatctttatctttatttgtatcatttatattaatttcattttcattaatattaggtatatcattaattgatgaaatccaatcaaattcatcataatcagaattattttttctaataacttcaattataacagatacaattgtaactaacccataattaccataattcaatataatatttaacatttcattaatacagtcagcagagattaattgtcttgttaaattgtttggaccaatattaggattatttgaattaatttcttgttgttgttcatctgaattattatttgcatttgtatttacattattatcttcccaaaatccaatatttgaactaataccaacaataccatttaataaattacaaatattatcttgaacttgatgatctaaataatattctttacaaatttttaataaatttaaaattaaattttgatcaattaaaatatcaattaaaccatttgaattataagatttatcagttgaaatcagacgaactaataaatcacaaactgtttgagaatatggtataaacttaattaattgattagttaataaataattatcttgttcaaatctaataaaattcataaatgcagaaatattaatcaatgctaaatcatcaacaaatttcaaaaaattattaaacatcaataactcatgactatctcttaaattttcaaatttatttgattcctctaattctgaaagtttttgtaaatctgttgaacttatatttatattttcatcaattgaagtagtttcattattagtattgctatcagtaataagatcatcatttgatttaattagatggatgtcttgaaaaaagaattttggatcattattaaagaaacctctccataatttagtaaagatatcaaaattcgataataaagtttgatgaatatttgaagaaggtaaaatcattatttcagatattatacttgctctttgtaaagcagtttgtaatttactttcagcggttaaatcatttttgtcaacttgggtattatctgcattgttattagtgttattattattattattattattatttgatatattttcagataaatcatcaattgaattgttatttgaagttgttgaatcatcagttgtagcaaagatatcgtgagataagaaatagtctggtattgtggaatccgatgtaaattttgataattcaagagagaataataaatattctaacattgtatctacaacatctttatttgaaaaataatcaattaatttattatttttagataaattaatttcatctaataaattaggttgatctaataatttattgaaaagatgaacatttatattacttttagagaattcaaataatggttgagtattatcagatgatagagttgaagttatactttcattacctgaaaggggttcatttgtattagtggtatcattattattgttattaagattatcattataatagtcttgatcatctttttcattatcattatcatcatcattatcactatcactatcgtcattcttatgacttgatttcatattaatatttgaagataatggggatggggaaggtgaattattttgaattgaatgtaataattgagatgctgttatattaaattgattagcatttggggaatatgcaacatgaggtgataccgaagttattgactgattaagttcgctattgttgttattgctattaggtgaagtggagttggtagcgttattatcatcattattcaacaatagagtaggagttgaaagagctgatattgatattgggattggagatgaagaatgggatagagagggagatggcggtgagggggggattgatttcaaagatattggtattgaagatattaatttgttattattattattagtagtagtagcactactactgctattattattattattattagcaattgattgttgtttaatcttttgagcattatcatgctctatatcagataagattttattaatattagcatttgagaaagagttattaaaaaagggccaaatagttgacattgttgtaaattagtgggaagatatgatgagtcaatgattgtgaatatgggtatatctcagccctgttaatactaataccaaactatgaggaaacaaataagatattaaaagaaaaccttgtaatcaaaagttgaggctcatgtattaatacaaacgactcccttctcttcaaattggaaagttcaaataagcatagtgagaaatctttaaaaattactaagttgccctcccagaaaataattttaaaataattttattaaatttgtcggaaatttggctgccatcgtcgcgtcttttttatttttaccgttttggggtctctacatgaatatcaatggattataatggaatcactctgaatgaatgaaaatcattagagattggtcttttttagcaatgaaaggtataataccttcaactagaagacatttccatgtcaccattaacactctagcttttaatcttagaaattccttgaattctaagactaaatcatcttctaatactacttctaatgatcggatctctaatgatcatatacattcatctcataaacattcttcattacttattcaaccttcaataccggtaagggcaagatttgctccatctccaactggatttttacatcttggttctcttagaactgccctatataattatttacttgcaaaatcaactaatggtacttttattttacgtttagaggatactgatcaaaatcgtttaattgatggtgctgaacaaaatatttatcaaactcttaaatggcttaatattaaaatggatgaaagtccaattaataatggtcctcattccccttatagacaaagtgaacgttcttcaatttatagtcattatgcaaatcaattattagagaaaggcttagcttatcgttgcttttgttcaaaacatagattggatggtttaagagattcagctagattattaaaacctccaacaactgtttcttatgatagaaattgtattaataatatctctgttgaggaaagtaataaaagaatggaaaatggtgaatcttttactataagatttaaatcaccaaatcaatatccaacatttatagatttattacatggtgaaattaatttacaacctcaaattaattcaattgataaaagatttgaagatcctgttttgatgaaaagtgatggtttaccaacttatcattttgctaatgttattgatgatcatttaatggaaataactcatgttattagaggtgaagaatgggttgcttcaactccaaaacatattgctttatataatgcttttggttgggaaattccaaaatttattcatatacctttacttacaactgtggctggtaagaaattaagtaaaagatctggtgatattgatataatgtcacttaaaaataaaggttatttacctgaagctttaattaattttagtgttcttttcggttggaatcctaagagagatttaggtgaaaaagttagtgaaatttattcattggatgaattatgtcaaaattggtcaattaatggtcttacaaagggtaatgctaaagttgattggaaaaaattagattattttaataaacattatttaactgaaaaattaaaagcttttaattcaacttttttccaaaatgcagttgaagaatcttatcaaaatattaaaaacactttaaatttaaataatttacaaaaggataaagtttcaaatgttttaaaaatgatctatccaagtttagttaaattaaatgatttcaatactgaactgtatcattattttttcataagtccaacttataacaaggatgaaattttaagtaaattgaaaattgataatcaaacacttacaaatattgttgacaaattagtacaaaattcaaaatccttatcacatgagcaatttaacgaaacaattaatattatccttttagaatcacctgatttgaaaaaacgtataatatttcaagtactaagatatgcattaagtggaccacaatcaggtattaatttaccgataattttggagttattaggtccagaagaagttcaatcaagacttcaaaatttccaaacttttttaaaactgtaaatagatctgtatataattattataataactaaccaaaatatattattcaagattctgtaaataatttggatcatttgtcattttcattttaaatttatcccaccagtcattaaacttattaatactaacattattgttattatcggtaaatgatgatagatagttatatgcattccctataattttattactaacattcaaaactaatgattgattaataacgggtatattattgttgctattatttgctttaaccaatgcattactattactatctcttgtaacttttaaacaatctaattgttgcattgcactctcattaggttcgatactaattccaattactatattaacttcttcattctctgaaattccactatccatatcaatatcaccttcatcatgagttccagatccagctggtatatcaatattacctggattaattttaaaaattgaactttgtttacttgcatttaaatatcctaataatttaaaatctccttgtgttatttgtccaaaattattaccattcggtgaatttgcattttcaggtattacttgataataaattaatgcagtaaaatcaggatcaaattgaacatttggtaacataaaaattgataaatgataaacttgtttaattggtacatgttgaaattcaatcatttgtttctgtggtgataccggttgtgcaattgcaaccggtttattcgatatggtagaggcaaacatccttatctttcaatcattctacatgtaaagattcaggtaatacagcaagattccctccctatagaaaacatgtcggtctttatacattttacgcggtgttaccgactgacaccgagaagtttctagaagcttcactctattttaatattataaaattacacaaacttgtttcctttgtagatatcactacatttggataaaggatttcttgttagatgaagtcttcctcactccagaacctccaattatcttttctgaactagatacacgacttttaggttttgaaacatgtgtaatagttttcctttgtttaccaattttaaggaaatttggatcttcccttactttaccattcaaactactatttggtgaattatttgatgatattgtagtagttgtggttgtagttgtagtctttttataagtatggtgaggatgttgatgatgatgtaccatcattaaggatcatattagatgtgtttaccatacttgatgatgttggtctatcatttcttatttctctatcatcaattacactttgattatgggtatgatttattgttgaagtatatgcatcctcttcatcagaattaacatatccttgaacgggactatctaatgaacgatattttcttggttgtccaggacttgtctctggaactgctttactattcatatttttcaatccagttgaaattttacgtcttctaactggtgttctaatcaattgatcattcttaaaattcatttgatcatcgcttgaatcatcagttatattaattccatcttcttcctcattttcttgttgttctcttttcttatattcttcatatgaaatcaatggatataaacctccaataaaatcatcaggaattgtatccaataccattgtatgtctccagtctctaaattcgttttgatgtaaatataaccaatgttgttgaggaccgacaaccatacctggtctaatcatcctcatatatgcaatacattcatttgctgtaaatccatgtgtataaattagatatgcaccaattaaacatccagttctacctaatccggctttacaatgaactgcaactttaccaccttttgatatgatactttcagcggccccaataaatttttgaacaaaatcaattgttggacatgaaccatcttcaaatatcatatcaatatgttgcatatttcttttagtaaattctctcttatcatataaatgagaatttaatctgacaactaatttaacattatttttagtgaaaaattctaaaacttgtttgaatggttgatttaatgttgcaccaggtcttgattgctttggtgatgcaaatggtataaaatcatttgctaagatattcaaatcaccttgatcaactctctcatattgttcatattcttctaaattaaatgatctcatatctaataaatttctttcctttgctctccaaactccataaactatatcttgaattgtaatttcaaaatcaggatgtgaatatcctgcatctctaaatcccatgaatggaggttcaaattgagaaattggtaataacacttgatgtggagcccaattttgaactaataccatataacaacataatatacatgcagcatttgttctttctttgggactacttgatgaataaaatccaacacttttatttttatttttggaatcatttaaaattttatgtaatgcaactgcaaatctatataaatgaccaacatgtaatggaccaaaatctaaattaaaattattatatggtaatgaatcttcaattgtaaaataaacaaaatcatcagtgtcttcaggttttacgtcacttacaacaaggtaaactttgccctttaaaaattcaattggagcaatatcttctttattcattatttagcaaaaaaatattagtgactacaaaactaacaaattaaagaaacgacagtagagatacagcagtaaagcaactattgtcacgggagtgatagcaactaagaaagaaagaggtaaaaaatataatacgatatctgaaaagatacgtttcttcttcttgatatattttaatgtcaaaagatcaactttgacatttccagtatttttatttaccttttcccctttctggctttcttattatcttttcattacactctttctttctttctctcttttcttggtgtttcttctataatggtgtataatacaagatggtatagtactaatcatatttctagtctctatatcaccgccaattatacttatctctactctcttttgtccctcttatacctataataaacgataaaagcccccatttttgagccaccatcagacgggtcgaactactattagaatattgaaaatattaatgattacctaatatagtaaataaaaccatgctaaagttcagcattactaagtggaatttcaatgaaaatggtttaaaccttcattcgatacctttgattaatccctacttataacaatcaatacacatttaaactagatttgtaaccatgtctgcttttggagattcatatcatactggtttgggaaataatggatttgaagtttcattgaattacattaccggtataccagatccaaatcatttgacatgttcaaatactttaaagttaacattcaaatcattactgaaaagggatgtcagtacaaaggaaaaatcaattactgcaatgtttaactatcttacagaaaatccagaggaattgaatgatgatttaacaatcatcacctgggttcaattatatccaaaactttcagttgatgattcaagaaaaattagagttacagctcatcaaattcaatcattattcgttttaaaattagggaaaaaatatgcaaaatacttaagggatacaattgcaatttggttagcaggtatctatgattcagatagaactgtatcaaaaatatgtaatgaatcaattcactcaacatttaatggagataaggttaaaatttcaaatctttggaaaatattcttcccacagataatcaaatattctcatcaagttatttgttgcgaaacaaaggatactatatcagatgaaagattttcaacaaaggatgaaactgaagctaaatttataagattgttacaaggttcaattttagttctcgttcatgccttaaatgaaaataatgcaacaactccaaatgatgaacttgtacaaatgataaacgatatatattctaatgattccttacatgattgttttacctccactaacttcaatttgaaaaaagcagcttatacatcatataagactttattgaaatcatccggtgttatgaataaacaattatacaaagcactttcaaaatcaatggttaaaggtcttaaatttgattccaaaacaaacccattattatactcttcaattataattactatattagagactttgtgctgtgttactgaatatgatacaagcttttggataaatatcaaaaaatctgatgaaaaattattatcattactcaaactgggatctcttaatagtgaacctcaatattatgatattatttataaacttatcaacttacttcctgatgaagttgtatcttttaaagacacacagaaaatggaaccttattctttagcgctgatggatggtatcaagaacgaaaagtcaattacttttattgaaaaaggttggataatcaataataaaataataaagcaaattttacaaaacggagatataactgataaaatattggaaaaatatactttgaatttgattactttaatggattcccctcgtgttttatctaaagctataatttcattattaaaagatgtgcatgagttttcaaatgatgataaagatgtgttattagatattaattctgcaataatggatgcattacctgataaaaagatagttttcacagaattcaagaattttgagcccaaatatcaaactaagtttattgaatcatttgttcaaattttaattgcaaatggatctgatttagcagaaggtcttattagcaaattccgttgattcattatctgaatatgataaattttcttcaaacccagaattaagttttaacatcatcaacttattcataaaacaaggagatgaaaaatatcatgaaagtattaatgattttactaactcattacctgaatatctctctgaaacttttatagatgttccattggaaactctcattttatattcacattcatcattgtcgactgatccagaagtgataaataatctagtcaataaattttatatcaaattacaggaacttaagcatgttgaaaacttattaagaatactttccaaattacagaaatttgatatccataaatcaagagatttaaatagttatttagttgaaaattccagatcattatctccaagtggtgaaacacaaaatagtagttcattatacgaattctcaactcctgaaattttatcaaacttatttaaaagtgatacctatgcttcatttgtttctaattgctccaaatattacaataacaccacttttgttgaattcaccaaacagaatatagaatttatcaacagattatgtctatctttacttcatcatcaacaaaatgacgctgaatatgactcttcactgatattattgaaaaatctccaacaaaactttgatactgacgctgaattaattgaaatgtttgtggaatcattattatttacagtatgcaaatatgagggctcatttgtaccactaatttcacacctatcaccaattcttattaaatcacttttgaaaaaagatcttttcgaagaatataagagcatattcacatcaactccacaaagtttactatctatgggtaactctttaggtttatctgtttatctctttattgacgatttcatttcaacagagccgctaaatattgttgaagcaaaaagagctatttaccaatctgtatttttaacagaagtcgttgccaaattcaaaaatgatactactgatgaaaatgatattttaacattagctctagttgctgaattatcttcagatattcttttcttgcaaaattcatttactggtgtttttgaaaacaaaattattgatttccaaagctccataaaatctaagtttttgaaaatttttgaacagtatacatttgttgacattgttaatatcttgaaaagttcagaggctttagatcttcaaaatcttttaaatcttattaataatgagaacaaacttttgtcatatcatgcacatagattactaaagattcttcttggatgacaaagttgtttcaatcatcaatgaaagattttgaaaagtattgatttcaaaccgtttagatccaagcttactttattgaatgtcatattggaagtcaagtactgaatttttaactgcaaagaatcttgattttactagaactgatgttgttgcaaacttgattggattaagagattctagactcaatcactaaaaagggcttaccttacttagttcacattgaacaattttatcaatttaggatactgataatgaaggcttagaagaatttacatttaattgcacctgcgagatgtatgatgttgttgaatacaatctctgattggttagattgtgatgttgcctttgaagatgtttttaatccctgtcagaattgcactaatgcaatttgtccaacgttatattacctagtatcttactatgtttgcgatagtaattacttaccagagtatattgagaaggttttcaaactaggtgtttcattatttactggaagtttcactttgataaattctgaagattaaaattgcacttgatcttacatatttttccttaaaacagtacatctcattattaaaatacaaaggggatatcgatatttgggattcagaagttgctgatgttaatggcgagatcattgaaatattttttaaaattgctgatattaaaggaaaaaatcaacctttaaagatttgttgtgaacaaatttccaaactattctcaaatcattttgatatgaagtctttcaacccattctatgaaaaattatataactttaatagattctgataacacagatcttcaaagattaactgtttcattattacacaaaatgattcctgaagttcaagataatttagttgttgagtttgctttgtcaaagaaaaaggttaatgaagatggtgtctctaacattgaattaccaaaggtattacttgatcatgttaacaagccattaaatgattacattgaatatgaagaagaatcagatgtttacaaatatttatggtgttggtatttagtcatggatcatttcaagaatatttctcaacaaatgagacaagattatattagtaatttgaatgaagaaactatatgcaaatttttagatttcttgttcagtgagttggatgtaagtaaattcaaattacatgatgatgatgaaaactacgttaagaattattccgttgatgacaataatgttttaacttacgaggaagaaattaaaaagctgttggtgaacttagtttatgaacttatggataatattggtggtactttgacacagaactggttcagatcaattaaagataaacaattacaacaaaacactgaaaagttcattattaatttcattagtccacaattaatcaatgacatattatctacattgtcaggtaaaacttctattgaagactcggaatttaagatcaatataaacaagaaaatgaatgaaatcaaatgtctttacaatattgatgaacagaaaatggaaacctcaatcgttttaccttcaaattatccattatctcaaatttctgttaatggtgttagtagggtaggtgttgatgaaaagaagtggaaatcatggatcatgtcagcacaatatgttattaattttcaaaatggttcaattttagattctattaaacatttcaaggataacgtcactgctaattttgaaaactatgaagattgtgcaatttgttattctatcttgaatgcagttgaccactctacaccaaataaagtatgtcctacatgtaaacataatttccattctgcttgtttgtatagatggttcaaaagttcaggtgcatcaacatgtccattatgtagatccaaattccaattcaagaaacattcttaagtgtaatttatatagtctatagatagaaaagtttataaagtttaatccattaattcttgatccaacaatttctctagttcatcgatactaaacccaatgtaaatcatttcaacgccagtagaatcacgacttaaggtacacattttatgttcagaaaattcacccaagatggttctgaaagatatatcatttgagataataaattcagagatacatagctcataaaaatcacgaagttggattgaacatttcattgaaccttttatattacctctattttcaaccaacttaacatcatctccaataaaattatcaattttttcaatttgtgatagaatcaaatgtttatataaacttttagcattttcagttaacgaatttaagacatatttagcaccacgtgagcctgcgatttcatcagttttacctaaactcaaaggatctttgaaagtcaactcagtagcgtaactttgataattagatatatggtgccagataaagttgaaattagagagcgttgatgcatcccaaagaacgggggtattaagattatcagcagtacataaaagggatatttgttgaatcttactgatttgactgagaatgtattgtaaatcttcattcttgaatgattcaccgtcaatattgttaatcagtataaataatttcgtcgacttatatttatgtttcatgaattcaaggtgcgttaagttacatatttctcttaactcatttctaatcggtgaaactttattaaagcacattttccataactctctaaacaaagatctaatagaaaactcgggattataaccattgataactaaacactttgcatttttttcctctggtaataaataatctcttaaaaatttgattaacagatttctctttgatccaaatccatagaacatcaagttaaaaccctctttcaattcaaaactccattgagcaaattgcatttcataaagtctggaaagatctgtttgtaacttggacattttcaaatctagttccttgttgtattcattaaattcttcatatgtcaactctgggaataaagacatagagtttttagagatgtgcggtctagtttgactctgttcaaaatatgcttcatatccgtcatgataaagggttctatttttggcattcttgtcagtttctaataattcatcatcatttgtatcaatatctggtacttccattaacttgatactttggaagtttttaggtttaagtttttcaaaatcattgaaactgctagcaagatttctggtacttcttcttggtgatcttggggatctcggggaagattctatggaagcggcttgaagttgtgtcgagattctcgttctaggtgttcttctaagaggggatggaaatgcagggttatttgattctttcttgatgggagttgataagggagtgttaactggtgaaattgagggttttatttcattagactcaaatttcaaagaaggtgttgtatccgtttttaagtttatacgaattgctgtgttactgatggttggtttcttcaatggaggttcttctgtgttttcttcaacaaattctataaattcattatgatcgtctttcaaaacttcatcatcttttcggaaagtaattgataattttcttttgcgtgatggactcgatatttctttctccgaattttcatctgaacctgtaagtacttctctcacattatcggcttctattttaggttcgggtatgtattcatcatcagtgcccaaatctgtttctgctattctctgttcaattcttcttcttctttgtatcttgagatcttcttgagcttcttcttcatcttctaaatgtagtggattagtaccatcaactttactcaatcgtataatttcattcaaaattctattttcattttgagccagttcttcgtcatcatcaatttcattttcaagattcaattttctattttgttttgcattttcatatgcaattttatttagttcaaacattgatctctttattggcgatctcaactttgcaactgaaaattccaacgtagatattcgatcttttttatgaggtgatttctggcccatatgaccagatccttgttttcttaacatagttagtttatttgaactttctttattttcgaaagaattagtaaatgtagttctaacgtagaattcatgcacactttcagtactgtaaacatgaacaatctacgcgataaattttcatgttgatgcacgacatgctatttgttgtgctagggagcttttaaaccaataaaatagtggtttccacactttagaaccttacttttttacaattattatggctttaaagtgtttgtgagtactttatagttaatatttggttgttattaatgttatttaagcaaaaaggttagaaaaaaaaattaattggaaagcaaagatttttggaatttaccaaccaagttagcaatacctcgaaatgctcatattttacttttacctaacaaaaatgtgatacatcattttaatgttttaaagattaactagtagaatgttttattaaaataagcatgttagattcaaaataaatgttaaacttacaaataagatcaatatgagaaagaaataaccgttgtttataacaaaaagatagtaatttcagtagaccttttgaataaattttatagttattataaaagcatgtatttataaattttaatttgatgattgtacataagtttaaatatagatatagatcaagttttaaatattgcgaattaggaaaatgatcaacgtgtaataaaataaaaaagaatactatcaatacaagcacgaagataataataataataatagtaataattatgataatgaaaagaaaagataaactcttgaaattatagcaaaagagaaaattaaattaaattgaattaatcaaatttaatcgaaagttcttttggtacctctgaaagaattaacaggggttgagttagcaccagaaccacttggtctgaaaccacctctgttatcatttctatcacggccacctctaccaccgaagccacctctaccacctctaccaccaaagttacctctaccaccattattgttttgaggttttggagttgagaaatctaatctaacagctctattgtttaagtattcaccatttaatttatctaaagcattttgtgcagcttcaacagattcaaattgaacataaccgaaaccctttaattgttcagtttctggatgagttggtaatctaacacccataattggaccgtattcagcaaagaattcagtaacactatctctatcagaatcgaatgataaattaccaatgaataaagtatcagatggttcagatttagaatcaccgaatttctttgctctatcatttgatctatcttgagtttttggttttgcagttgagatatcaacattaattggtctaccatcaatttcagcaccttgcatttcttctaaagctttatcagcgacttcctttgattcaaaatcaacataaccgtaaccctttgatctaccagtttgtctatcagagataactcttgcggaaataacacctggatatttttcgaattcacgctttaaccaatcatcatcaatattccatgaaagacgaccaatgaaaagagttgctggttcagatgatgaagcttcttcagtctttgcttttttggtttctggttcaggggatgcagatgaggatgattcttcagattcttcagcttttctcttttttgaagattcttcttccttagtttcttcttcatcatcagatgaatcggatgagtcagatgaggatgatgatgatgatgatgatgatgatgatgatgatgattcatctttcttttcttccttcttttcttcttcttcatcatcagatgaattcaggaatcagatgaatcagatgaagattcttctttcttttcttcctttttttcttcttcttcttcgtcagatgatgaatcagaatcagatgaagatgaatcagatgaggaatcttctttcttttcttcttcttcatcagaggatgagtcggaatcggatgatgattcttcagatgagatgatgaagatgaagattcagagtaggaagattcttccttcttttgcttaggaagccttacttgctttttcttcttgtttctttgaaacggatttctttgatttcttaatatctgccttagccattgttattatatattagtttgatgagattgaattctaagaaatgaataaaagttcaaaagaagttaataataattaattctaacaagatgaaatgaaatatttttaaactaaaactacaaagaaacagggtggtttataagtaaaaatccaacagataaaaaatttttcagtcttgtattgtaatctgaaaaatttttttattttatttttgagggagaaaaaaaaattttttttatagtagccgctgcgcttagtaaaaagaaatttttcactttgatataccttgttacgtaatatatgggatgaaagatctctcttaacatgattatttcaatatttcagtgtttcgatattgattattcaattgataaattcaagtttatatagcaattgaaataggtgacaatgactgaagtatcataccctgctaaagtcttaccaggagaaccaatcctaccaatatatccaaccaacagatacttctaagagtataaaatatatagctggagaaaatgtacgtttagagacaattcaatttaataatcaaaaaatcccaactcttgtatcaacagcacttggacgtgttgaaattcacagataatattaataacaatagtatatccaatacagaaggtacaagatgaaaagaaaattgatgataagaatagctaaaatagtatcagttatatcaaagaaagattttagatataatacaggtaatgataatcaacaatatgatgctagctgtaagaattttaaagcagttaacgccgaaagtcaatgatattgtcttagctagaattacaaaattaagtcactgtaagaattaatgttgaaattttaagtgttttaccagaaaattctcaagataatggaaatattgataatttacaattattaaatttattaccaagtgaaactggtagaatttttaaagcaactataagatcacaagatgttcgctcaactgaacgtgaaaatgttaaaacttgggaatgttatcaacctggtgatattatacgtgcagttgttttatcattaggtgatggtgtaacattttatctatcaactgctagaaatgatttaggtgttcgtatttgcacgtaatgataatggtgaattattatacccattagattgggaaacaatggttgcaccaagtactggggaagttttcaaaagaaaatgtgcaaaacctttctaagtgtgtataatatgtctaacaattttcattatgatgtatattgtattggaatatattaattcaaaactataaatttaaataaataagggaattgaaaaaaaagacaaataatatattgtgtgtaaaaagatatgtttttaaataatttaatttaatatgaatactttataatgattattcttgtgaacaatctctaccaaagattgcaacttttaaccaatctgaaacgacaaagattttattacgaatacctaataacattgtaacataagctgaacgccagaagaagaaagtcattgtaccacctaatgcaacagttgaccaatctccccatgataaatctgcaactgcacgttctgaaccaatataagctaatgcaccttgatgaatatattcaaatggtttatcagttttttcaatacgagctaaacgtttatttaatttattaatttcattttcatcatttgaattattaattaaatattgaatatcatttttctttgataatttattaaaatgatcagcaaggaaaacaccttgttgatgagcaacttgagcagttggtggattagcagtaaatgtacaatcacctaatgcgaaaatattatcatcaccatctaattttaaataatcatcaactaataaacctcttctagcagttttttgttcaataattttagaagctaattgttttgtaagttcacgttgtgcattaccacctgcccaaactaatgtaccataaggaattgtaatatcttcagtttcaccatttggatgtttataagttgcagtaaacattttgatcatcaacttttttaaccattgtatcaacttgtaaatcaacaccttgctctttgaaaacatctttagtatatgcaattaattttggatgaaacattgataaaacattatgttgagcttcaattaatgtaactttcatttctttttcaataccaggtataaatttagataaatcttgtaaaatataatctttaatttcagctgctaattcaacaccagttggaccaccaccacaaacaacgaaatttaataatctttttctatcatctgaatcttttggtaataatcttgaagcttcaatttgatcaaataatttttgtctaacagcagttgcatcatttgcttcttttaagaatgaagcatattcattaataccaggtataccaaaagtattaacagttgcaccaactgcataaactaaataatcataattaagagttgtctctaaaggatctctttcacttgtaaaagcatcaccaacgaaaaatctttgagatttatgttcaattttaacagttttattttcaggatcgacatcttttgcaattgcttccaggtaagtaacttcaccaggggtttgtcttgcaattgttctaacagaatcacaaattgattttatattaatagtaccacttggaactgaaggtaaaagaggagtaaataagaaataatttcttggactaacaattgtaacattatattgagttgtatctaatttattaaggaaagaaattgcaccccaacctgaacctaagataacaatatgttttttcttattaccattatcctttaaatcagtttgaggtaattgtttaccaggatttgattctttataaactaaataagtaagataacaccaaccagcaatacctgaccagaaaactgcacggaatgaccaagtgaaaatatttgatttaacagtaacatttttgttagcatttagtagcattagtagcattattagcattaatattgaagtcttctagaagtatttgaaaagaatctattaccagaaggaactaaatttttctttgaattattgaaaacagaaataggattgattctgttatttaaaaataaccccctattattaagtttactagtgaacttaaatgataagttcaaacgattagtcatcattatttaaaaagatgtcactatgatgataacaaaagagcaaaaaatggttgacggaataaaagttatacagctacactataaaaaaatagaataaaatagaataaaatctaaataaatcagaaaattgaacataagttgtcaatagagtactaacattacttaacctataatccgttatcaccagagtgacacattgaaaattgaaaaaaatttggaaaaattcgagaaattgcaacaataggaaacttgtattttcaagcgggtgggtcattcttaggaggaggtttatccgatataagttactgtgctaagtacttactgggtttgtgtttcaacgagtcgtctcgtctgtgcctgttgtacttgtcgtagtatcttagctatctctgctacatcctctacatcaacatcaatatctccatcaatttcaccttcaacatctccaataatgttgatatcttcaatattctcaaattgtccctcttcaaattcaatctctccagttttggcattattcttaccttctttatcatctgtaacagtaataatatctttagtaataactctatcactaataactttttctttaccatctttattattattatctttattattattatcatcttcattattatcttcataaatatcttcaatatctccacttgttgtaacagctacaaccgcctgcagctgctgcttcaatatcagctcttgaaacccctgatttattattttcaacatcttcaatacttaattgatttttaccattcttcatcatcatatgactagaatttaataaattattttgttcctccaaaggtttatgatgtttatgattataactcatttgaattataccatgaacaatatcataacttaatgatattttagaacaacattcctctgtttttaacctatttaaaacattcctcttattctcactcctacttttacgtcttctaaatttatcttgctgaacaaataaacatccatgtaattttcttagctctattacattcaataaatgatggattatgatgatccctaactgcaaacttaaatcctgtaacttcctgtaatggatgaacatacctttcaactattttctctccaatattttgaactatctcatgctgttaattcatttggtaaatatcttggaaattcactctcttcactatatgctctataattatgttgatataaatcaattacattattaagtgcaactttcgataaaaatatatgccaatcatctgataaattaggtaatttaaataaaactcttggtttacgttccctaactttcctcctttctcgacattgtacacatgtttgatatttctctaattgatgttcattctccagaagtctcttcattctacatcttgaacatttccttatattagaaattggacttatttcaaggttattagttataattggcgtttatactattctccccattagttttatctataattttattattgttactttctatttttattatcattatcattatcaatattaatagcagaaattcctattatcattaccagtaacgttattctctggctttttacattttcttgataaatctagaatagtattgttaatcaatttatgtgatttttcaaaatttattgtgttccttagttctatttattatattattaataatattagcagtactattcttattattggtatttccattatcattatcattatttttatctatctttttattcttattattatcatatggtatattgtttaaattcagacacatcttatcaatttttattcgtttcgtttttaatggtataccatcttcattacctttatgaagtttattcttattattattgatattcccagtattattgatactattctttattatgttattatcgttatttcggactactacttttattactctcattattattggtatttcctcttaccttttgattatcattattttcttttaatatagtaataccattattactattattattcttagtagtattatttaaatttgtaatatcatttataacatcatcatcaatatttaaattaccagttttcaacatttaaatttaatcctgtttgattatttaattgtaaatgaggtatatgattactattactattttgacctctattaacaattgatttaatataatttttaaatggttcactatcactttcattaaatgcattatttaatgcattttcaattgcattatgatctaaatgatcaattttatcaatatcaacatcaacatcaacacccacatcaacaccaacatcatcatcggataattgaacatccataccaacttcattacttaaatttcttaattcatatcttaattgattatttaattgatttaaatgataatcatttaaattttcgatattatttatattttcaagattaaatgtaacattatcatcacataatgatttattattctccattatgtttttataaaaattcacgtcgttgtatatctaaatgatatcaacttggtttacttctccagaaaaagtaagcaataattgtgtaaatttcatattattttcaaaatgttaataatttaaatttttcatgcacttaaaattgtccttatttgggctacttttcattgatttgtttggtttctttagtggttttttttgtttccatgggtatagtactgtagctatgatgataatatgtagtgcagtacttgatttgtgtatttaaagtaataattggggggtattaacagttgaaatgaattaacaccctgtacaccaaaaattcataattgtagcgcttcatgaatgagaagatagatctctaattgaagttgaagtatataggattagaaagtataccattaaagtgtgatgtatattatcttacaattactttaaatactaataactaaaatgtcaagcaggagcaggaaacaagagattaaagtaatagatgatgaggatatcattgatttagaggaagatgaaattgatgaagatgttgtcaataatgaagaagatgataatgaagaggaagaagaggaagatgatgaattacttagtgctataaatacatatgatgaagttgatgatacaccaatacccgaaactaaaagcgcaagtaaaagaacaaagtaaaagtaaaagtacaagtacagtgaagaataataaaaatgttaaggtgaagagtaaaacacgtaatagtttggttattaatattaaacttcccaagaatggtaaggataagaagaaagttgacaaggtgaaggtagagaaggagaaacacggtaaaaagattaacttaaaacttaagaatctaactaaaaaggataataaatcagcatcaagtgaagatattaaaaaattaaaaccaagtaaaactaaacaacgtgagagaagtcaagataaggaagaagatgaagaagatgaagaagaagatgaggaggatgaagatattgaactcgaagatgattcagatgatgttataggattagatgatgttgaagatgattcagatgatgataatttaatttataaatctgatgatgaaaatgaaattgatttaagtaaactaagtgatagacaaagggctaaatatttaggtacatccgaagatcctgatgatttaaaacctgaattttatcaagataaaaagctaccaaagagtgttttagcattaatggaaggtaatcaaaaaaagaaacaattaacacaggaagaaattgaaatgaggaaatccgaggcagctcgtaaacgtaaaacttttaatttacgtaaattagaagctgaaaagaaggaaacattaaagaaattattacatcgtaaaattgagaaagttgatgcaaagaaacaagaatttgaagaagagagaaggaaacaaaataaattaaagagaaaggaaattattaaacataaagcgttatttagttgggtttcaagaactgaagttatcaatgatgaaaaagtcaatgtatcatattattcaatgcaatgagtgaatgatttatatatgatatttagcttatatataactaacaattaattctttggctttttaggattttgagcttcatcaacagctactttaaaggaacttaaaaataccataccttccatcatacataataataaacaagtcattttctttaaagtactcattctaaattttcttaataaaggatataatataacaattgcttcaagacaatgtataattaatattgttctgaaaactgtaatatgataatccattatataagattgaacatttgatgataaatttaataattgatcgccaattaagtattgtagaattgaaggatcataggcaaatatgtaaagtgaaataaataagaaaactgtaatccaatctttgaatttaaaaggtatatcattaattaaatattcactaaaacctctctttgcagctgctttttgagccatttcaactaatttattacgagaatcacgataagattgtaaagttggttcaaaaggtatacgtatgaaaacattttgtaccatgcatatcaactataactaattgtcattgaacttaatgataaagtttctaaagttggattacgttttgcaatttctgaatcaacatgtgaataaactactaaataatcttctaaattatgaacatgatctttattcatatgagcgattattcgaggaatgatatgtgaatcgtctgtcattttgtttgaggttattcgatagtgatatcaacttagataaaagaaagatgttatacaggtagattagtaatttttgaaataaaattgggttaatcggaaagtgtataattttgagagactaaaaaaattaaattcgttatatccgatcttttgatgaatttcacattgtttttattctgagtgatttattagatcagtatcgatattttaaatacatacttgacatagaaataatgacagagaattggaaagagcagatattggtaactacaggtgcaacagttagtttcccattattaattgagaagataattgattttaaatttattgagatgatttcacaaaaatataaaaatattgaccggatattagttcaatatggtaaaccggaaacatcagttcatatgatgcatcagatattggatgatttacagaaagttaaaaaggttaaagtaaaagaatatgatgatgaaaaatatgggatagtatttgaatttaagataaataacattttgataaaatgtgttcagtatgataatttattaaatgaacaatatagtaaaaaatgttccattgttatatcacatgccggtacaggtacaattatggatgttttacgaagtaaaagtgataataatattcgattaatagttgtagttaatgaacaattagcggataatcatcagaaagagattggagatgcatttgagaaattgggtgtattggaatgttgcactgtaaatgaagtatttgataaagtagtatcaaatgtggctggtgaagatagtgaaagtaaatcattaccagcgagccgtggcgcagtagtttataatattgtcagtgaaatgattatgtcataattaaatagtatagtcacttaaaattatttttcaaccagtaagtgtgtcagtattttgccaccaggaacagagtctattttttagcatggaagttttttaattattaatatttattctttgctaataaatttaatttatgtcataacacgcgcgtaatgaaatttccctttttggggtaaattccatcaatttatgcaattatcgtctattggcaaggggttacatcggggtgagtgattttgacaacagtgtaatgatgtataatactataaggttgatagtaatatatatagcagtcgaatatatatagtatagtaatgtagtatatgacatatctaataacagtgtaaatataccaatataacaataatactaaataaagtaactattaatataacgccatataattaagatactaaaaatagaaacaacagatcaatttaatttcccaaaaaggaaatgtgatgatttatttttaatttctaaaggagttaaattgaactttttcaattttccactcctccatactaataatccattccctttttgtcccgctttgatactgtttcactttctatttaaatagaatcactgttccaccttttccttttttacctattctctccactcctctcctcttttcttttcttctaaaatttttcacttgtttctttttccagaaaagtttttactaactctaataacacacaaactagaaacaaataatgcaatatagaaatttaggtgtcttcgctttagcaggttctgctgcagctgcttatgttccatctgaaccatggtccactttaaccccaactgttaccctttcaggtgcaaagactgattatactggttcattcggtattgcagttaatccaatcccaactactttatccgcttcccttaacgcaaaggaattaaagagaaaggcaggtgctgcaactcaaattggtgatggtcaaattcaagcaactactggtactgaaaataacgtcaagactaaaactactactttagcagcaattactcaaatcggtgatggtcaaattcaagcttcaactgcaactccaagtcccaaaaccaaaggcacaaccagttactcaaattggtgacggtcaaattcaagctactaccgcaactgaaactactaaaacaattattgctaatgtcgttacacaaattggcgatggtcaaattcaagctactactagaactgaaactaaacaattagttaacaatgttatcacccaaattggtgatggtcaaattcaagctactactgctactgttgctttaatctctcaaattggtgatggtcaaattcaagcaactactgcaactccaaaatcaaaggcacaaccagttactcaaattggtgatggtcaaattcaagcaactaccgcaactgaaactactacagaaaagacaaaggcacaaccagttactcaaatcggtgatggtcaaattcaagcaactactactaccgaaaagtcaaaggcaactgcagcaactcaaatcggtgatggtcaagttcaagcaactactgaaaaaccaaaggcaactggtgctactcaaattggtgatggtcaagttcaagcaactactgaaaaaccaaaggcaactggtgctactcaaattggtgatggtcaagttcaagcttcaactactgcttcacaatctcctgcacaatcatctgctgatgcacaagctgctgctgatggtattgcatatgaagcatgtaactctaatggtactttatcaatgactttacacaatggtatcttaactgattcaaagggtagaattggttcaattgttgcaaatcaacaattccaatttgatggtccacctccacaagctggtgcaatctatgctgctggttggtcaatctctccagaaggtaaattagcaattggtaactctactactttctaccaatgtctttcaggtaatttctacaacttatatgcaaatgaaattggtagtaaatgtgaaccagttgaattagatgttgttgaattagttaactgttaattgatttaacatgataatactaaaccaatgaaaaaatattcatctgtattctatcactaatttttctttttcttacctctttgcattctcatttcttgcacgttaatagtttttaccaaatacctcataattacattatatttactattacaaacacaatatttatttaaaagatgattctcgttcgtttcatatataatacttaaaattgtatagattttattataataatactaatactaatttaaaataacattaataataaaaatagtaatcatcgtaattatagttatgatagcaaaagcttaaaatagatcttaacttgaaagacgcgactgttccaatttcaaaatttcaaaaaatccccaaatttccagttgcttcggtggcgtaagagagtctctctgagatacttgttggcgctacatcatcatcttcaatttgggaacctggttgtattaagttgtatatatcgttatctcttccttttagaaccatccaatcaccgcaatgtccgaggctcctccaatcgaactagtggatgtttgtcaattatcatccctgggtattaaccctcaatcctttaatttcttaagtacaactttagaatccgatcattatgtctgttgtcgtgaaactagtgaatcaggtaattctgcaattatagttgatttaaaaaataacaataatgttattaagaaatcaatgtctgctgattctgttattatgcatccaaatgatttggttatctctcttagagctaatgatacaacaattcaaatctttaatttagaatcaaagcaaagattaaaatcaaatgttatgaatgagaagatagttttctggaaatggttagataatcaaactttaggtttagttacaattaattcagtttatacttggaatgtctttgatggtactgaagctggccctgttttattaacttcaagacatgttagtttaaatgattgtcaaattactcagttttctgcaaataaataccttaattggtttgcaattggcggtattgctcaagaaaatggcagaattgttggtcatgttcaacttttctcaaaggaaagaaatatctctcaaccgattgaagctcatgtttgtaattttacaagtttaaaacttcaaggctcatcagttgaaactgaattatttgcttttgcttcaagaactgaaaatggtggtattctacatattaatgaaattgatcataaagatggtgctcctcattttgttaaaaaatcagttgatatctttttccctgctgaagttagtaacgattttcctgttgcaattcaattatcttcaaaatatggtattgcttacattttaactaaattaggctttattcatttatatgatgttgaaactggtaagaaaattttcttaaatagaatctcttctgatcctgtttttgttggtgcaaatttcaataatgatagtggtataattacaattaatagatctggttcagttttagccgttgaaatttcaactgaaagaattattccttacattttaaataacttaggtgacgttgaattagcattaagtctagcttcaagaagtggtttacctggtgctgaaaatcttttcacccatcaatttaatcaatcaattgcaactggtgattatcaatcagctgttaaaattgctgcttcttctcctcaattaagaaattcagatactattgctaaattaaaaagtttaccttctcaacaaggtcaacctgcacctttcttacaatatttggtctttttattagatagaggttcattaaataaatttgaaacattagaattagttagacctttggtacaacaaaatagaactgaaactttggaaaaatatttaaaggaagataaacttgattgttcagaagaattaggtgatttaattaaacctctaaatataactttagcattagctgtttattataagtctaatgtatctaataaagttgttttatgtttagctgaattaggtcaatttgataaaattttaccattctgtgaaaaagttaactataaaccaaactttactgttttaattcaaaatatcttaagatctaaccctgataaagcagcggaatttgcaacttctttattacaatctcaacctgaattaaacgttcaacaaattgctgatattttcttttctcaaaattatattcaacaagcaactgcttttttactggatgcattgaaggaagataaacctgcagatggtcaactacaaactaaattattagaagttaatttattacatgcacctcaagttgctgatgctattttaggtaataatatgttcactcattatgatagaccaacaattgcacaattatgtgaaaaggcaggtttataccaaagagctttggaactttatgacaatataaaagatattaaaagagttatcacacatgctaatgaattaccagccgattgggttgtttcatactttggtaatttaaaagttgatcaatctgttgcttgtttaagagaaattttatcaagtaatattgctcaaaacttacaagttgcaatccaaattgccaccagatattctgaattaattggtgcaattactttaatcaaaatctttgaagatttcaaatcagttgaaggtttatactattatttatcatctattgttaatgttactcaagatcctgaagttgttttgaaatatattcaatgtgctgctaaattaggccaagtcaaagaaattgaaagagttgttagagataataatgtttatgatggtgaaaaagttaagaatttcttaaaggaagctcaattagaagatcaattaccacttattgttgtttgtgatagatacaattttgttcatgatttaattctttacctttacaagaataaatttttcaagttcattgaagtttatgttcagcaagttaatccttctaaaacctctcaagttgttgctgctttattagatgttgattgtgatgagaatattatcaaatcattattacaatctgttttaggtcaagttccaattgctgaattgtgtgaagaagttgaaaagagaaatagattaaagattttattacctttcttagaagcaactttagcttcaggtactcaagataaagcagtttatgatactttagcgaaaatttacattgattctaataacaacccagaaaaattcttaaaggaaaatgatcaatatgatactttagttgttggtaaatactgtgaaaagagagatccattcttagcttatattgcttatgataaaggtttaaatgatgatgaattaatcaacattactaatgaaaactcaatgtttaagtaccaagcaagatatttattaaagagatcagatttatcattatgggctaaagttttaactccagataatatttacaagaaacaattagttgatcaagttgttggtactggtattccagaattagaagacccacaaccaatttcaattgctgttaaagctttcatggacaaccaattacaaagtgaattgattgatttattagaaaagattgtcttagaaccttctccattcaatgaaaacccttcattacaagcattattaattttaactgctgcaaaggttgattcatcacgtattatgaattacattgaaaagattgatgcatacaatccagatgaagttgcaccaatttgtattgaaaacaaattatatgaagaagcatttgaaatttataataaatttgaaaactatccaaaggctatgaaagttttagttgaagatattatgtcattagataggggtgaagaatatgctgaaaaattagataaaccagaaatttggtcacaattgggtgaagctcagttaaatggtttaagaatcaacgaagcaatcaattcatacttaaaagcagaagacccatctaattatgcaaatgttattgaagttagtgaacacgcaggtaaggaagaagaactcattccattcttaatgatggcaagaaagactttaagagaatcagttattgatggttcaattattaatgcatatgctactcttgataaattgagtgaaattgaaaaattcttaaaattgtcaaatgttgcagatctagaaacaattggtgataaattatatgataatggtaattataaagctgctaaattattatttgaaaatatttctaattattcaaaattagcatcaacattagttttcttaaacgattacacagctgctgttgattgcgctagaaaggcatctaatattcaagtttggaaacaagttaatcaagcatgtattgaacataaggaattcaaattagcgcaaatgtgtggtttacacttaattgttcatgctgaagagttagaaccattagttacacaatatgaatataatggttatttcaaggaattaatttcattatttgaaaatggtttatcattagaaagagcacatatgggtatgtttactgaattagcaatcttgtataccaaatatgaaccttcaaagacaatggaacacttgaaattattctggtcaagaattaatattccaaaggtaatcagagcatgtgaagaatctcatttatggcctgaattaattttcctctactgtcattatgacgagtgggacaatgcagcattagctatgattgaaagatctgaaagtgcgtttgaacattcttcatttaaggaaattattgtcaaggtttctaatttagaaatttattacagagcaatcaatttttacactaacttacatccaactttattaatcgatttattagtcgttttaactccaagattagatttaccaagagttattaagattttccaaaaatctgataatttaccattaattaaaccattcataatttcagtattagaaaagaacaattcaatcgttaattctgcataccacgatattttaattgaagaagaagattacaagtcattacgtttagcaattgattcatatgataaatttgatagtattggactagctgaaagattagagaaacatgaattaattttctttagacaattagctgcaattatttacagaaataataagaaattcaacaaggcaatctcattactcaaatccgatggtctttggtcagatgcaattgaaactgcagaaatttcacaaaataccaaggttgtaagtgatttattaacatattttgttgaaactggtaatcgtgaatgtatggttgccaccttatattcatgttattcatatattgattatgatgttgtaatggagctttcatggttaaacggattagatgacttaactaaaccatatcaaatttcaattgcaaaggaaaatcaacaaaagattaatgcagtttataaggatttaaaagctagagaagaaaaagaaaaatctgaagaggaaactccaaaattaggtcaacctttaatgattacaaatggtgctatgggccaagctccattaggtgttaattctacaggtatgggttttggtaatgcaggtttctaggggatgaaaactggaattatgaatatcgataccaatattgttaatctatatttttactagaaaaaacatttaaagaaacaattttagactgatgtttttttgtcttttcattttacatttttatttattaatctctctttattattttatcttcattatatatatgcgtttttatgtatttgtttatcaaaaatatattatatcaaattaaattaaattaaattaaattaaattaaattaaattaaattaagttgaactatagaacttataaatggaattcaccattgctatcctttgtaatataagatttttcagttacaatacaatcaatattttcatgaggtgtaacatcaaaggatggattccaaacatcaatatctaaaggtgccattctaaccctctctaatgcaacatcaccagttttagaatcaattgcaaatttattattttcaattttagcacctaaaaccatagttaattcatcctttggacgttcttcaattttaatatcaataccagattcagtattataatcaattgtagtaattggagcagcaccaatgaatttaatttcatcatacaatttagatattaaggataattggaaagtaccaattttattagctaaatcaccatttttaacaattctatcagaagccaacaataatgaatcttaatggagcattcgatgataaagttgataaaatatgttgattttgatgattttcaggtctatttaaattatcgattaagaatgatggcatgttatctgttattaaagtgaatggaattttttcatattgtaattcataagcagttaatctagaaccttgattataaggtcttgtttcacatggatatgtatgttcaaaatagaatggatattcagtggtttctttggataaatattgatttaaatgacgaattatacctaatgcggtaccatgacctgaagttgctaatgaaccagtgttacaaatggtcataacagaaaaaggacctttaaaattttcagctttcaatgtttcgatgatatattgtaaaccattattaccaatatcaatatttgattggaaatcttccttgtataagttttcagagaatgataagatacgagaatacaaatcagaagtagtagtaatggaagaatcagcaattatacttttgatttgattacaaccatttgctaaattaacggcagtgggacgtgattgaatcaattcatcaattctctctaataaacgtgccttgaaattttcataattgcttatatcataatttaaagcatgtgaaaatgaatcatcattgagtactttatccatttcaacaacaattgcaaagcaaccaactaacataattgcaggggcaccacgagtgtacattcccttaatagcttcataacctgaaaatgtggtaacatctttagatggagcaattgaatcaatatttaaatattttgattgatatggcacttgaagttggttaaggatggaaagagatacttttggagaggattgaaacttgatagcttgtaaagacatttctagtagtataataaactatttgtttgatactaaaatcgatagtataacgatattttcctcaaaataaaagaaaagaaagctagtaaaacctggtataaaagtgtaagaaataaaatttccatgttaaggaaaatagacttacctctattcgaatccccaacaacgcaaaaaagcaaaattttctagtttttcactctgagacacagtgaaggcaaatttcacttgaattttattatatgccattaaatcggttccttgaatttgataggattttcatgtgaattaatatagacttagtttctttgggcaaatgactgtgcaggcagttaatgggtcgaccagtacaaacggtcagactgcaaataattcatcaaatggtagtactactaaaaatgatcagcaaaatggtcaaatcccatcatcaaatgggaaactaactccaactcaaagtcaacaacaaaaggaacctctttcacaatcacaatcacaatcaccttctccatcacaatcacaaattcaatcacagtttcttcctccatacccatttctggatactttttcatgtgtttgtatcctagtaatgttaccacattggataagtttcattttagttgtcttgtatgtttttatggggtattcggagtttttggaaggcaatctacacatttctacttaatataaaacttaacaaacattcatttattagtgttagtaatataactgcccctaattcatcatttctattttcatcttacccaatttatccagttttattcacaagattctcattattatttatcataacacaaataatttccgattcaatattaatgctgttagtttattactggtttccttcaattataccatacattttactattatctaaagctttaatgggaagtaacttaacctctctaaaatctcgatatatttttgatgcatttggttcagctattttggttgtgttacttgaatattcaattttgaatacaattaaatattttgaaattgttaggggtgaatcacttttaagtttaaattccatattttcatcatctgaatttattttacctttacaacatagacttacgccaagtacaacgaaattcattttataccatttaagtttccataatatccaacaaaattcagtactcatgtttcaacttgaatatgctttccaatttttacattcaactttgtcactgtatatcatcatgcataacttaaatccaatattaagaaaattgtcaataattaatagtacttattcatttttcgaatctttaacttcttcaaaggcaaaatcaaaagaagattctgaaagttctggatccaagtctgatccaagctctgaaaatgatttttcatcaataccattagaaattagtgcaatgcaacagaattcaattaataaaccaaagactcaaaatgttttcgaaattccagttgaaatttcaagctccaaattcccatcactagaaatgaacgatgatttaggaggcgaagacattgttgaaaataaccagcaattatatagaggaaggtagcaaatgatgatgatgagaatgttgaacttgattcagatctctcaagccgatactcctcttttagttcctaccgatactggtaccggtgtttcatcatggtattctttaacttatcaaatgctcaacctgcgtgatatttcttctcccaaatatgttgtaacagcaaactttgataatttttgtaaaagattatggttgcaattttcttttaataattcatttctgaatcaaaatggtaattcaagtaattccaatatattcaaataataataataataatactaatgttaataatgttgctgcaaatttaaatcatccttccaatatcacctgagtttcaaagtacaactagttttgcaaataatttggcacaacaaccaagtgtcccaccatcatctgcatcatccttctcctaaacaaaaaagtaatggatttcatatgaatcatgttgccaataaaaagttaccaaataaattgaaaagttcatctttcgaaaggaaaaataaactatatatttctaagtatcaacaagccattatggacattcttgaatgctgctaaaattatgttttcaagactggattattattcaggagattattattctcaaaatgctattgttacaacaagttatggagttgactgattatattcgtaataatgattcttcaccacaatgttttatttggtttacaggtgaaactactttggcatttgaacttcataatattagtcttgaacaactgttgataaaagttaatggaattatttgggaacatgttgcatcatgttcattttttggtaaagagttaattataattaatggattgagtccattaagccaatacgatattgattttgtgaaaattaccattaatggtgaattagttcatttaactactacaactgtttctacaatttttgaaaataaaactgttactgaatcaagtacttcatcaccattagccacattacaaagatctgttgttactactcaagaagcaattgatcgtgaaaaagcaagattgaaaaagttgaagaatgaatggaagaaaaaatcatcacaaatcaagaatgaaattgataatttaaataatagaagtaatctgtctgatgaatcaagaaacttataaaaaattggatagtttaagacaagcaattgttaaatttgatagtgatatttccacaatttcaagaaaatcagaagaaactagaattttacaaattgaagttgaggagaagtatcatgaaatgagaagaaagtttgaaaatgaaaccagattatttaaaaagtttgatgaagaatgtagaaacaaacttagtattgaagaggataaaataagtactttactatcagagaaaaatcaattattagtgaaaaaggaacgtattatctctaaaaaattacgtattcatcatgatgttgaattgatcaacaatgaaattgagagtttgaaaaagatggagatatcattacgtgttgaaagacgtaagattaagagtattcaaagagaagaaaaattcaagttgttgattaaagatatcaagaatgtggagaaacaactgagactgaacagagcttaactttgtaaactactttctttaactaattttactattttactttattctattttattctatgtataggtatacaatatgcacatgtatatatcagtaattcattttgattctataaattctttaccaacagtgtggaatttcctcttgtagtataataacccacctgaaggtttttcagttgtcaatatatcaacgattttacaagtccatatttcatgattatagacttcgaaaactttatatttttcacaaattagtatatgatcagaaacatcatgtagtatgggtatatcaaaatccttatttgataacatctcccatttaattgacggtattctctcaaatggagattcatgtcttgcaccacgactaaagctacgagctagttcaacactatccaaatttggtttcaatacatgtaatgccatatatttcagttcatgcatacttgatgaagtggctgatggtatctgtatattaaattgaacaataggttcaggatgaactgttactgatgcaactgatgataatgttgtaccaaacatttttgcggggttagttggatgtgcagttgcagatgttaaaatcattgcatttgaagctattgacgacattgtatttttgaacatattcgatagattcttcatctttgaactgtgtatagagagtgtatcgatattgtttaaagaaagaactggaagaaaaaagtatattcaaagatttaagggttttgacggtttttgaaaatctgcaatattcatgttgagcttctccaatgacaaccgtttctttccaaacttaactattttctttcatttctaagttatatcaaataaaccaacatgaaactatttatacatcactcacagaggactggtaactactggaaagaacttgaaaaatcagttgctgcatcagttatattgtcaccacctagaatggtccacgcatcaagagtagttgttcctcgtgatttactaatacgtactaaaatctcagtatatgatggtgataacataatagcacccgttggtgttgatgagaaattgataccaggtacaaatatattccattatccacgttgtcgtaaagtatttgaaaactatggtaaaaaatctaaagttaatgaaaaaggtttacttacagttgaaaagttttcatttatgccatcagctacagataagaaagaattagttctctggcatcctaaaacgcttgatgttattgattcaatgcaaaagcaaatatccaagtcttctaaatcagaatttcttcacgatctttatttatcataatgatattttgttattctataaaaaagtttcagtaaaaaataattacacaggtataccataaacaactgcagaagcaccatttaaatatgttaatttacaaacattacgtgaaataccgacaccttgacataaattatttggtttatccaatacggcaacagttaatttatcaatatcacgatctgttacatcccacatatttgcaattagcattggacatttaccattaatataattgaatgctgtaccataagcatatgaaaatcctaattgtttcatacgacctgatgaacatccagctaacatagttactggtatactttccctacttttcactttacgtgattgtaaatattgttcaccacctccatgacctgcatataaatacatattaacattattaaaagcttttaaaatatctgattcattgggtggtttaccaataacaccttcccaaccattcatatccttcaatcttttacctaaattatattcagttctttgtaaatccccaccaggatttataacataatatcctttattatcatttaattcaatattaccaaatttatttaaatattgacaaatttgtgaaatacttggcattctactaactgatctcatacgtaatgttggtatactttcccaaggaattttcaaacatccattaccaggtataagaataatatgaccattttcattaacaatatttgcaacttttccaaatataactttagaaacatcaattagatattcatttgtatatttgacatcaataaaaccagttaaaaaattcaatatctgtaatatttttctttcactaacatctctaacgtgtaaaaacatttcaaagatacgtttatgaaatttattaaattcaggtatcattttcttaatatcttttattaaccaatcaacttctgaattatttataccgaaaattgaattaaatccaccaaaccattcatcatcaattttatcaactaaaactttcatacgattatctaatttattacgtttatcccaccattgtctcttttcttcaattgtatgaattttactagttatttcaatacttgtagtcaaatcactctgttcaattatattatcaaattctttaattatttcgtcatatccttcaattggtaaattaataaaaaatggagttttatatttattctcatatctccaaataactaatgatttactcgattcaatatattctatattcacaataatccaatcagatggaatatgtaatgataaatctatatccggtttgattgttttaatgtccatttcagggaataaattcttagtattatcatatgttgcaaattgtttctcatattgaaatcctttcattttgaaaatttcattagatttgataatattccaaatatcttcattacaatcagttccagaatctatatttgttagtagctcattgattgatttttcataccccagttgaaacatttcagtacttatattatcatagttttgtaaatttattgaactatttctaggaactgtttcattgaatataggataacacgtagttttacgtgatactgtttcaattcttctattttttgcatattcatgcatggattttatccatgaataatctaattctgaagatacgagtaaaccattaactgaatcatccaattgtttcatagtatttcctagctttgaatcttttgttttcctataataattttcaaatacaataaatttataaatattcacaaacttattaatttcaatatctgacattgaatccattatctccttagccttttcaatatcatcaatatacatataataatcaactaacttcaaactgtaaacatgtataattgattcagatgtttgtatttgtaagaaaacagtcatttctttgagataatagttaaattccttttgcataccaagttttgaataagtctcaattaaatttgaataacaattaagcatttcataagagaatttcattttcagttgttttaaaaattcccaattacatttccatttatccaatatgaaatttttgaaaatagattgtaatattgacattgatcttcttaaattgacaacttggttaatattatcattgcttaaatatccacatatttgacatagtttagataatataaataatacacgaattgatgattgtctagatattttcgataatttatacttttcatcattgtgtaaaattttattaattttatcaactgtttgcatatctttttgaattaatgcaatattcaaggataattctattccatcatatgtttcatagttcaatttgagtttttccttttgtattaaattcatgattttagaatattgttcagtttttaaacatgaatcaatgtatttcttaaatatttgatgtaatcgtattgatgagatacattttcttctctttgttatgtataattctaatatttcacatgtaatatcatccatgtaattatatgcgtaatattcacataaactatcaataacattatcttcatatatcgtatggacaacatcacaattattgatccaattactaatacagtcctttactggtggtataatatcctgcagtagatacagatgtgttattatcaacccagatataccaataactggtgattttttaggtattcctatattagtgttttggaaattaataccgaatgataaattcattgaaattttggaaaggaagtagaaaaataatccagtatccttaatcatgtctttgcaaatcattatagtttgacttattaaaacttcatgagatgtattcaatgattctaatctatcaattattgaaattacaatagatataactaatgattcatcttttatgtattcaaacaatgtacttattatatcaaaatttgtaatgatacatttagttagaatatttaagctcatatcatagggtttgaaaatatttgaatcatattgaaatattggagtttcattaaacacagagttaagtaataataattgtaaaatgaatgaattttcaatatttaatttttcatattctttaattgaaatataattaattttctttattataatatctaatgattcattattgaaaattcttaatttaagataatactggaagaaattcatactaattattgaatcaatatctaatgaatgatttgcaaaatgaaagaatagttttataaaattaccgattcttttatcttcatcttgaataatcaaataatcacataaatttgataaacattgataaatgaaatttaaattattatcatcaattgaaacatctttattttataagtaatcaaatcaattaatttaagtatatttttatccttatttaaatttttacaagttttattaagtattttaattatttgatcattttgtaaattatcattgaaatctattttttgtactttattaattaattcatcaatgtcattagtattctttattgttgaaaatttagttgataattcatccagtaatgaaagttgttcattattacataattttgtcaattgataaaaatatttatttgacattctatgaactaaatttgatgatttatcaaacattttacagccatctttattaatttttttcaataaggaaatttggaaatcatcacttcttattgcaaattgtgcagctattattaggaatattaatttatgtatagttttcaaatttatacttaattgaagaaatatagaaattattttataattaagttttgtaaggggggattatttgactgtatatatctgtggatgaattgaaactgtttgctatttgatctaattgtgatggtgaaggtgaattaagggaaatgtgatgtaatgcaaataatttaaaatgaataaattgttcggtgttaggaatatttgaattaaataagaaatcttctatcgatgatgaatttgaaacaagtttcaacgtacatgatagtatactattatagtattcattagttggatctaatctatcaagtattgatatatttatatcaactattttacttaaatctaaagattttaaatttttttcaatttttgaaatataattatcaatcaattgataattaatttgattgatattattaacaatatcaataccggttgattcaaccgtcattatttgatgattaaaaggaatagaaatgaagtgtatggatcgaatataaaagaacctaatgtgacgaggttaaaagaatggaaaacatgcagggtgtttacataatgcacgttttgggaaaaaggtaaacatgaaaaaaaaattattcaatacagttttactataaagtatttaatatacctaaaataaaatacataattaataactttagaaatcacctggaacaggatatttagaaacgaaatctacaacttctttatctaaagctttaacttgttcatcatttgaggctaattctttaaaattagataatttttcctttggagtttcaccaatttcctttgattttaaatcaattgcaattttaactgctttatcaattaaatctgcaactttttcaaattcttcaccaaggaaacctctagttgtcatagcaggagtaccaactcttaaacctgaagggaaaagagctgaaatatcacctggaacagtatttttatttgcagcaatattaattttttctaaaatagcttcaactctagcaccatcaatacctttatttcttaaatcaactaaaattaaatgagtatcagtaccatcagagactaatttaaaaccttttgatttaagtgcattagcgaaaatagttgcatttgagataatatctttttgatattgtttatattcaggagattgagtttgctttaaagcaactgataaagctgaaattgtatgattatgtggaccaccttgatgagctgggaaaacggagaaattaatttttttctctaaatcataatgaatttctttaccctttttagtaattttctttaaaccttttctaaagaagatcattgcacctcttggacctcttaaagatttatgagttgtagttgtaactatatcagaataagggaaaggagaatcagttacaccagctgagactaaacctgatatatgagccatatcagataaaagataagcaccaactttatcagcaattgatttcatttttttataatcaataattctagcataggcagaagcacctgcaacaataattttaggtctaaataaaatagcagttttctctaacatttcataatctattaaaccagtttcttcatttaatctataaggcattgtttggaaatatttagaaatataagaaattttagttgttgaagtttgataaccatgagataaatgaccaccatgaggtaaatcaagacccataattctatcaccaacatttaaaatagcagaataagcatataaattagctggagcaccagataatgattgaacattaactccccattcatttggatttaaattaaaagcttctaaagctctcttttgacataaactttcagccatatcaataaattcattaccaccataatatctttcaccagggtaaccttcagaatatttattttgcatttcagaacctaataaatccataacagcttttgaagtaaaattttcacttggaataagagtaattgaatttttttgtctttccttttctaattgtaaaatattatacatttcaggatcaacatctttaacagattttgaaattaaatttttagattcaattgataaagcataattacgtttagtaaatgcattaattgaagatttcttaatagtagaaatagataatcttgagaacatctttggttaggtgaagggagatagaagatagaagaaataaataaacaaacatgaaaattaaatgaaaagacccttcatacaagtgaaaagtgaaattatttcaattcaattcaattaatgtgactcagttgagaaatttattactattattactattattattatcagagtcaaataaaatttaatttttcaaatttttttcaaatttttaaaaccacgtgacacatattacgtaatataaatttagtcacgtgactatatgtatattacgtaatactaaaaattatattttaatctttcaatcttttaatctgttaatgaattaattataattagaatacaccaaagtatgattaattagctatatattaatattagttagtttatacagtttattatattatactcgcatttaatatacaatgaatacatctccaagtataccctctgataactcttttgtgtctcctattatatcttcctctaatacttctaatatttcaaataattcaaatattaatattaatattgataatgatatagatatagatattgatataaatattgataataataataataataataataataataataataataataataatactatacaaaataataatactcctaatactacatataaactaaaatcaatacctcataatcatatttatacccataaaccttctaatcattattctaatatacataataccaataccaatactaataccaataccaataccactcatactattaataataatagaaaaccaagaaaaaatcatataataaataatttagatctatcccttcgtcgtgatgataatagattaaaatatgaattattaaaagaatcaaataaaattcataatcatttaatcaattcattatttaatgatgaagattattatgctgattatgaagaagaagaaggggaaggggataatgatgaattacagaatgaattaattgaattggaaaaattacaaaaattacaagatttacaagatttaaaagatttagaaattttattaaatttaaatgatttacaaatatagtatatgatagtatagtatagtataatatacctattacttacttgtatactttctatataatgattggataactaatataatataatggatgattaaaggtaaagtactgtaaagtaacatataattttttattatggcgtgtaatctattctatctaacactccctttttatgacaaaatgtcagattgggaagatgatatgtatgatgatgatgaaaatgatgaagaattatcattcgatgatgatgataatgatgatgatgatgataatatagtcattgataatgatataaactgtaaaaagccaaaaattttagatattgaatcattatatttccaatcaaagaatttaaaagaagatgaaaattacattgaatcaattaaattatttgaaattataattaatgataatagtaatatatcttatcaatttaaatcaattaaacaattaattaaaatttatgaattaaatgaagataatattgataaaattattatattaattgataaattatttgaaattttcattaataatactaattcaattgatttatcatattttaaatcttcattaagtaaaataataaatagaattgaaagattaaatacaaaagattcatttgatttacaaatatttcaaaaattagttgataatttacaaaattttaatgacactagttataataaacttttgataaaattacaattatctatttcaaataatttaattaatttaaacaaactaaatgaagcttcaattatattaaataatttacaatcacagataattgataatcatgatccattttttattaatataattgcatttaaaatatcaatattaattgaaaaacttagattatcatctgatgattataaaatcctaggtaaacttaaaaaatattgtaaattagcaaataatttaatttcaggtataccacaatctaaaatattaggtataattaatgatggttcaggtattatttcattatattcacatgattatttaaatgccaatatttatttccaaaattctttcaaaaattttaatgattttggtgatattaaaagaattgatttattaattaaatttataattacaagtattttaattaataatgaaattaatccatttcaatcaaatgattttaaaggttttattaaaaatgataagattaagttattattagaaatttataaatcttatcaagaagttaatttgaaaaatttaattctttaattaataatgagttagtggagttagatttattgaaagattataaaataattgaaaaatttataccaataattcaaatgaatttacaattaaattatttatcaaataggataaaattatttgaaaaagttaaatttgattattttatgaatagaatggaaattaatgattatcaatattttaaaaaatattattaaaattatattcaaagggtgaattaaccaactataaaataaatttcaagcataattatatcataaagagagaccttcatacatttattaatattaaaccaattcaatatattgataattattttagattaaaagaatgtattaatgaaaattgtcatgaagagtttgttcaaaatttaaaatccataaaggaaaagaaaattgataatgaaaatgataaaacatttgatgaacaaagtcaattacaaacagataataattattttacaaatatcaatatgaatatgaatatcctcaatactggtcaaacatttagttcagataaaccaataaatgaaattgatattgataatattaaattagaatgtatgtattcctcaaatacattacaaaatttattaaataatttatatgaagataaaacattaaagaaagatttaccgaatcatttaaatatacgacctacattaatttcatatattgaagaatatttaagaattttgaataattcaataccaatagttgataaaaatgataataataatgataataaatcatatataaataaagttaatgatacaagggctaatatggaattaagtatgttatataaagataaagataaagaatcatcatcattatcatcaaataattatgaaaaagatgataatatacctgatattatacaacatactaatatgaatcaattagaaacacctcataataacgatgtgaaattagatgaagatgttcaattgaatactaaaagtcagaaactgttacaattgcaattgataagagataatattgcttcaataggtagcaaaggtgatgaaatgatgtttaatgtgtgagattacgtaatattttaaataaaattatttatttttcactgtaaaaatttttttttccaattaaagtatcaaatctttgatcttttatctcttttagacaaggggtatagaatatatagaacaaacatgtctattaataaacaaaccaaggcagctaagagaaaaaccagtatgaataaaaagcgtgaagttgaaccagagattaaatctgattcacaagctagaaatgtattacaaaatcaaccaaaattaacaccaaaatccgagaagagaacaatgaagggtaaagaattaaagaaacatttacgtagtagtcaattatatggatctaagaagaaagagagagtttatagtgaaaaggaattaaatataccaaaattaaataaggcgattgtccccggtgtaattgttaaaaagggtaaaaagaaaggtaagaaatttataaatgatgatgattctattacattacaaagattaataaagagtattaatgatgatagagatttagttaatgaaagtaaattagagaagagtaaaagattagaagagatacgagatttaagaagacaagaaatggaggatagagagaatgaaaagaagagtaaattagagaatgttaaaagtaatattaaggagaaggcaagtgttgctagaaatgtcagaagaaagaatgcaaaggcagcaaagaaagaaattgaaaagagtgcaattgcaagtgttaaaaagaagagtgtttcatttgcatagagaggtcttttcattgtataataatatagtaactattatcaacattaatctatagaaatacatctattctaatcatattaagtagtatactatctattatgtagtatctagtatatctagtataataatactaatttaattacgtaatcatcacgtgaccaccgacgcatcgactcttttatttaaattttataaaaaattggctgccttaacaaattcataatctgtactgtaaagagagagttagagatacttaaagagaagaagaagtttatcatttaaagagatagaaactttctcttttcaagtcaattaacaatggttaatatcgtatatcctatagctttgattgcttcttttatcacttcatcatctgcttcatcatttgctaatacttcaccacttttagtagtttcaaatcatgatatcaataatgatttacaattaaataataaaattgaatattttaataaaattgataattcaattaactcattaactaagaatatttgtaataataataatgataatgacgatgatcaaagtatactatatttaagaattcatggattaaaggaatctgatttagataattcacaatttatctcaaattttaataataataataataataataataataataataataatattataacattatcaaataatgttgtatatgataatgaaaacaataataattatttaaatatccatcaatcctgtggatctattaatcaattggatatttataatatcaatgaaattaatactatcattaataatatcaatgatgcttcatttataattattcaaggattaccaaatacacatattaaatcatttaattctaataaagaatctgaaaaagttttacattattctaaatcatctcataaaagagaagaagaaattaattatcaagaaattgaatctcaattagaggaatcatttaattcaattaatgaattatttaatgaagatttagatcatgatactgtaactatttattcaaaatcaaaatcaaattcagaatcaaaatcttcaacttcaactcctgtaaaggtaattaatggttcattatttgataaatattcatttttcactaatggtatttggatgtgtacaattgttttccttttcttagcttggattgtaactgttgcattaagttggttaaatagtatgcaaattagttatggttcatttgataaaccatttgattttgaaaaaaaattacaatgatgttttatttataaaatttatactttctataattccttttaataaacatatggaataattttatatggtactttcttcttatattcaatccatgaattaccatattttttaaaacatttttcatcatccctaatttgtctatgaattaataatgatgtaaaataaattacataaaaatatgttaaaattgtattaaattttgttggtaaacaccagcttaatgcaattatcatatcaccaaaataattaatatgttgtgaaatcccccaccaaccttcaattaataattttgtacctctttcagttttaattgattttaaatttgataatttacctgatctaaaattatttttttcattatttgatgctttaaaaatataaaatccaattatcattaataaaattataataaacatttcaaaatttgttaaattaatttcttttaatgttaaatatcttgcttgtaaacaataacaaaatggaacccaacataaatcaccaaatgctaacataaatccaaaaccatcagttgtaatatcaaccattgttaaacaaccttcttcatttaaaacaccatcaattatataaataaattgtaataaattaactaaaatcattgaatttgtaatataaccaattttttgaaattgtctctgtaaacatgataaattaagtaaaaaccataataataaaccaggtcttaattcacaaaataatttaatatcccaatcaccaattcttggatttaattctctaccaataaaccaatcaaataagatatttttggaattaccattaatacttaaaattctttcataattaccattatcatttttatttcttaatggtataaaagatgtaaaataaacgaaaaaacttaataaaattgaaaattcccaagttgtaaacattaaatttaagaaattatcataaaggaaatttaattcaggcaaattgaaacctaatagataaaatcttgaacatataataattaataataaactaactaattgtaaaccatttatattatattttaatttactaccatcacgtaatttaataccaaatttttcattacctggaatataaacatcaagtaaaactaatgaaaagaaccaatataaataatatttccaagattgataatcaaaaaggagtttgttaagatcattgtatacataagttttaaatgcatcttttaataattgtaaattaagattaaaaccttccattaaataaatttcattacaagctaagaataggaataatgtaactaatggtaagaaaataattaagattaatgaaccaattggtccaccaaattctgttgttttagtaacaggattcagtactgtcattgatgatcagaggaatgaaattaaatatgaaattaaagatgaaattagaagatgaaattaaagatcaactttaataaactgatttgaaataattcatgtccttgacaaaatattattatacgagataactatacgagatatacgagatattaaaatgaaaatcaaaataccaaacaagaattcgaaatgattaccaaacagtcacgtgatctaatatttttattatataagtcacgtgttattagcaatttgaaaaaatatactataaagaaaataattattctataatacggagaatgcatgaaaatctcactgttgtatacaatacattttgattaatataaaccttttacagtaatattattaagaattgatcacataactattctatgatggaatgaaattatcttgtatatctcgtagatttttatatactaaacaaaacccattaattatgtcaacagattatttaagagaagcttatattgctcaattagccgttaagagagcttcattattaacttgtaaagtaagtgaagaacatttaaatgaacaaagtattgataaatctgatagttccccagttacagttggtgattttggtgctcaagcaattataattaaatcaattttaagtaatttccctaatgatgaagttgtaggagaggaagattcaaatttaattaaagagaaaaaaattgataatttaattttcaaatatgttaatgaaattcaaaatttagattcaattaataatgaaaatttaaatattattgaaaattcaaatgatttatgtgatacaatcgataaaggtaattcacagggtggtccaaagggtagaatttgggctttagatccaattgatggtacaaaaggtttccttagaggtgatcaatatgctgtttgtttagctttaattgttgatggtgatgttaaagttggtgtaattggttgtccaaatttacctcatgatttacgtaaagaaaattcacctaaaggtggattatttactgcaattaaaggtcatggttcatatttccaagatttaaaatcagatattacattcccattaaataaatcatcaccaattaatgttcataatgattatgatttatcaaaggcaagagttttagaaggtgttgaaaaagctcattcatctcatagtttacaaaatttaattaaagaaaaattaaatataaaacaaccttcagttaatcttgattctcaagcaaaatattgtgctttatcaaagggtgatgcagaaatttatttaagattaccaaaagatccaaattatagagaaaaaatttgggatcatgcagctggtttccttttagttaatgaaagtggtggtaaagtaactgatatttatggtaatttattaaaatttgattatgatagaactttaaatagtcaaggtgtaattgctgcttcaaataaagttcattctcaagtaattgatgctattaaatcaattattggtgaaaatggtgaaaatttaaaagatttttgttaattaattaattagtattattgtataagaattaatttagttatctatgctcatttctctgtttcttctgtttcttcttccattaccacatcatcagtttcatcatccttttcttcttcatcagttcctttactttcatcaactactacactcttttccgtacttttcacagattccttcaattcatctcgtactttatccttttcttcatcaaaatcaacttcctctcctttcaatgatttaatcattttctctataagttctttatcattctctaaagctatcgttacatcttcatcaatatcaccattctcaccatcatattcttcaccatcaaattcttcaagctcttcatcttcaaagctaccatgatggtttgtcttatttagcacaattttataatctgattcagttattgtgtctttcttagtagtaatctcaatcaacttcttggctctgttaaatgcattcaatgaatttatacatgtaatatctcgtatttttttatcctttctacttctactatctgtaatagttatttcataaactcccttattcactttaacgttaaacccatccatattactcattataccttagaagtactacttttacaaaggaaaaagaaagaagtaaagtcagttaacttaacaatcaatttttattatgccaactttcaacgcgttgtctataagaccctcttcaccacttcctccactcatttcttaatgatcaacacaattatcatcaactaaattgcatggacttaaagaagaaaccaactaaaaaggataactttgtatttcttttcaaaggttctccattaaatgatttcctttatcctttcaaaaaagctgcaaatcaatgggttgctagatacattattgtcacatttgcaattattattagatgtgcagttggtttaggttcatattctggtgaaaatcaaccaccaaattttggtgattttgaatataatagacattatatggaaatagttacttcattaccattatatcaatggtatttacaagatttaggtaactctaactttatgttaaaatttcctccattatatgcatatcattcatttatttgggggattattggtaaattaattgataaatcatggtttgaattaaataattcaattggatgtcaagatattgatttaaaatcatttatgagaataactgttttattttcagaattaattgcttatattccatcagttatcatttacacacgttggatgggtagacattataataaagcaccttcaattgatcaaactattatagctgcaactattttattcttaccagatttagcaattattgatcatggtcatttccaatataattcatttttattaggtattgctttaattgcacttaataatttattatatgataatttagctttagcttcaatatttttcactttatcaatatgtttcaatccaatgattctatactatagtccaattttcttcttttatcttttatcattatgctttgttccaaaatttaatcttataaggttgatatatattggtgtatcggtattattaacattcattgtgatatttctcccatttatttattctggtggtatccaattactatctcatattttatacactgctttcccattgaattttaatattttacatcaatcatatccaaatttctggtcaatgacaaatcatttattaaacaacaatattgagttatcaaatttgaaaaatttatcaataatattaacaatattagcaatttcaccatcttgctatgcaattttcacaaatacttcaaagagattacttccatggtgtttagcttcttgttcattatctttcttcttattttcatttcttattgatgaaacttcagttttattaccttggatgccagtgacattattacttaacgaagttgatgctgatgttatttcaatgatttgttggtttttcaatacttgcttgttttcattaatgccattgttgaaaaaggatggattattattacaatattttgtcttaggtgtcttgagtaattggttaatgggtaatttaagttgggttagaaaatttgttaatattattattccatttatctctcaaagaccaaatgctacacctgttttaccccatagttattcttggactgctactattatatttttttacgttactgctactattatactttcatgtgatttattacaaattcaaccacttgttgaaattgaaaatttttgggaaatttcaaatacatttctttcaacaatttcctttggaattttttatgtttggttaaactttaaaatatacactatacattcattaaaagcaaaatcagactgaatttttgtttagcaaataaaattttagaaagagtttcttttaatgtatcctctattctttttgatttaatcttcattcttcccatcagcatatggatcttcaacatcttcaatatattcaaaatcaacggcagatggattcccatatttagaacagtctggcatgtatacatgctttttcattgatctattactatcgaaaaatccccattctgtctcccatgttctattactatcccaccagattttcttccatggctcattaaatgcttcaaagaaaaatgcatcatttaatatttcagccggtgttgtacataaccaatcatttaaaaattgttgatattcccaacttcctgcaattgatctaataaattcaccaccctgatatggccatccaatttcagatataataagtttactatttggtttgttagctggttttaatggtactaattgactatagtaataatctaatgcccatcttgttccaaattgtgcatcaacacctccgaagaatggatgaatatttgcaccaacaaaatcacaatcatcaaacataatagatgttattttagatcctatttctgatgtaccaacaggtaaattggtgatatttaatgactttaaatattcttttgtttctttaacataactaagcaattgttcaattgttctatcatttctatagattacttcatttccaataaaaattgaatgaaaatattctcttggatattttgaaagtgcagaacgcatatcggcaatttgttgttgattagtattttcatcattaccaatccaaacacctaatgcaagtgtcatattaactttaagatcatcaattgcttgaagaattagatctgcttgattacattgtgtaccatatgttttgacagttccagtaatttttgacaatctagcaatatctaatattacatctttcaacttagctccacattgtggttcaataacattttcaggcgcatatgagacccctgaaaacataaacttcaaattatcttcagtcatcattgttttaacttcaacatcattttggtatttaggatttatattttcaaaattattaacaatacttttaatatcagaatcgttttctctaggagaatatgttatcttttgtctgtcaccattttcttctttcatttgctttttggattcacctaaaatgttgtatttctctgataattgtaaaaccaatagttttctagtttgattagaacttttttcaaagtattccattatatccttttcagctaatatgacaacattttttgaattagtgaaaaacatattaaatgttaatgtaatcacatagataaataaagttgcaactaataaaccgtaacaaacatatttccaagggttgaaatcaactttaccatcactggaatctttttcttgaaaataaatctcttgtggttgttccttgaagcttacagatcttgttctactaggtcttctatgaacaccatcatctttgctgcccggtggtgatgaatcttcaacaattacattatcctgatctgtaaatggatttcttaacgaacctgctctctccaaatcaatcgattttgccgataatctggttaaaccatcaatgtcaccatacttccattcttgtgtatgttgacttgtttgctcccctaatatattattagctaaaagctcattctccataaagatgtgaggttcaagcttcaaagttttgttgtcatcattagaaaggtttgattcagcagaattagattgataaccaaagtttttaatcaaagatccaccatcaccccattcactactgtcttcattacttacagacttttgattagcttcaactaattcacctttctttgttgtttttatactgtcttcataaaaggaagaagaaacgtcgttgacagaagctatttctggaatcaaacgagcagattcaccaataacacccttgaaagactgtttcttcccaatgggatcgaattctacaaaattgatatcatcggaagccttttctgcattttttatggaatcttcatattcatctaaaatattggctatttgatctgaagatccggaatctacattttcttgagctttttgtctttctaaaaatccttcttcaatgtttaacaatggtagttcagcatctgtatcaacattatgttctactacctcattcttttgtaagtttgtgactatatttgaatcctctgtgactatatacggattgccatttttttgatgttgatgttctttaacgatgcccctggaatcaccttcaacaactaaatctttttttttcgccatcatcatcatcatcatgggatttctcaaaattagagatgagattcctgacactaccaaccttctcgtttaatgaaggtatgtttttactcatctacagcgtctaattttacttaactttcttagaaaaaataaacaaggtacttttgctatataaacaagatataagaaatacaaaaggtaaacacagagccatcatgaaaatttaacggttccttttttcatatcaactccgaaatttcaattccgcactttaaactccggtatcctcttctattcccaacacactttcaataccccatttatttgctatcttcactctcaagactttcaattctttctccatatatgagatcaccttaccatcgttttgatatgatactttgtttaccaaaagtgaatgtgagttatcgaataaactactcaaacgttgtttcaaagaattatctaataaaacaccaaaatgattgatacctttattttcactacgttgtgcatcattattaggatccattcccagtaaaatatctgcatttttcaaaaaaatgctctgatcagcaaacccaaacataaatgcagctattttatcaaacaaattgtacaatgtagttaacgaatggtaataatagaaatgatattcttcactttcaataaaaatcgatttcaaatccccaagagcacaaaacaagtgcattatatcaaaaatatctggctgattaaagtgggcagatacatagttccctaaattttgcatccagttggtaaaatgaatccaatgaagagtatgtgtagtttttatgcgttcaatatggaatattattaatgcacacattgccttggtattatttgaataattttcattattagtgttaactttactgaattgagtctcaaattttgaatattcattagttgcaagtgaactgatataacttttttctaaaactaatgctatatcatcaacagtttccacaaactgtagttttttatgtaacgattccgcaatcgtttcaatttttaatttattcatcaaaattttccattccggtaaatcgattttattttctgcaactgtgaaaaggtagaatgaaatatttttaataaaatccctggcactataatcatttaattgtttataaagtacagagacaatatcttcaataattaatttaatatcttcaggagattcttgcttactttgaaataattgtgataaacacataattgtgattttttctctcatctgttgaaatgtcattttgtttagattcttgaatttatctttactaacagtgataatttctgcttctaatatgctattataaaactcaaaaatatctgagttaaaatttgttagatgtttaaaaaataccatcaaaacatccttaataacagatgaaacatcaaaccacgtcaccaaatagttaaaaaattcaacttcaaatctttccctgaattccttgtttccaaaataattccaatcggtatatagtatttgcattgcactgtcattattttttgatgatgaaaataaccaatatcttagatatgataatttcattgaatgactacttagcttttcatctattaatcgcatctttgaatatttagctatatcatgaatggcttttttgatcctggatgaatctttattgctgatatcaactccatttgtaaattcaaattgcgttctgatgatatcaaacgagctgttatataccgtttctaaagtttcacaatacgtatctgaaaactttagcttcaaaataattgaaaaaaaatctaacattcttttcatgtgtgaaacatcttgaccattcaaagtagaattaacatcaatgattaaatctttatagttaacaaatatttctctatcagtattcatgtttttcattttactaattatacttggaaggaaatttcttactgtgttatatggtcttctaggtgtagatctaataattgttctcaataatgcaagtgctgatttcatagaataaatagaaccatttcttatcatatcagtcaatatcgattcaaggcccgaaagtaaatcttgatcaaaaatataaaccagcattaatatcaccttagctctattttgaagttgaattggcgaatatccaaaggttgatctaacaggaacaattctttcaatcatttgtttagtgttttcagtcaaatattgcttagcaaatatatcaatcaacttgaaataaatatctaaacatccatcatcagtttctagagagtctgttgctggaatgttaggatatattgatggtttatcagacactgaagatccaatattttcgaatttatattcagctagtaatctaaataatttaacaattaattgatcttccaattcccaacctaattctctattaatttttaaaattgaggcaaacaagtatttaatttctgatttcttttcactgtcttcagtaatatcgttggcatacttgacaagaaatttggtaaatatttcccaatccatttccacttttttataagctgaacaaaaaattaaataattaaccaaattcaaaattttaatatcagatttctcaaatgcatctgttatatacatccatggattattggtacattttagaaataatttcaaagattcaagtgcaattgttttctttctaataaataaattttcaaaatctatactgatgatatttgatgtaaacttcttagtaatccagatttctgtttttttaaaactactgtaatattcagaaaactcaggtaacatattttgtaacattttgacaaacaaaaggaaatatggtgcaaatatgcaataatataaagcatttggatctgttatctttttgaatttgttcaaaaatgaattgatctctaacccaatcttacttaataaatcaggacaatctttttttgcatttgaaattatcattataatatgaatgaggcatttccttaactgtttaagttccgtaatattcataatatctacttgaatagcacctaacataatatcaaaaaacgcttgaagtttggaatatgtgctttcacttttcaaaggaacttggaatacaaacgaggatgatgaaaacactatttttatatctttagatctataataagtttgatcttcagataaacatttacttaataatgaagaattaagaaaagagtctggaacactcaattcagtatagtggttgaccttcaaacataaaataaacctgtatttcctttcttcaatgtcttttattgatttaaatttgccccaatttttatcaattgagttcccaacagtttcggaattgttagtggtattttcagtttctggtaatttatcatcagttgaagtaattgtttgcaaatttacgttggtatttcttgcattatctatttcaaacgatgggatattacttgtcattttatcgtttaaaatatttggagcaacaccttccgcctcaatggtttcaacattaggtcttcttgaaaatacaaagttttgatcattaacaggtgcaaaagaacttgcaatgacaccttttttatgtttgtttctctttgttagaatcttttttggctttttttgtgggtgatttcaattctgctggtggacttcttttgtatggcagtgctttattttctttcacattttgaactattttatcaattaaagaacgttgaaaaaaaggtttcttggtttgttctttataaatgacacctctctctttgaatttagatgattctgagctcgcaactgatggttgtttggcactcttatttaaaggaccaacttcttcatcagataaacttaaaaattccattgaatatggtttaaaactgggtgtgcttcttgaaatttgggttgaactcacaatatttctaatagatttttttgattttggtattttaggtattgtaaagtcaaacactttatcatcctcttgtatttgaatatcatttggattgtgactttttcttagtgtattgctggatgatttgcttcgtttagaattcgagttattatctttggaaattttcggccttttttcagagttagaaatatctttggaattatctttcaatctcttagagttcagtgacttagttttgtaggcattaattggactgctatcatgcttccagagctctaaattaccatcatcttcttcatcttcatcttcatcttcaccctgttccgatccattatccatattatctagatcattatcattatcttcttcgtctactgagaattcttcatcggagttatcatcaacattcaaacctaccagattattttgagtttcatttaaagcattcataccatccataattttataaaatgattctttagaataaggaccataaccaacatcgttatcacgtctttcagcacgacgtttttgatattttatatctaaataatgcattatgttatcatcggatttaccttcattttccattgagataagttcatatctagttgataatcctaaatattcagccctatcaactaaatacggatttctgttaacaatatttctatgacgtaaattcctcccactagctgaaatgatttcgttttcaggtagtactttgaatgaattttcagtgtgcaccacatcaaatacttctggaatattaatatcttttctatgtttctttaattcggcatcaaccatttccattactgcattttcattatcattttgaaggttggaagaagcgtctattaattcaatagattcattatgtacatgttctaaatctttatcttcattaaatgacgttctagttcccaaatcagtatctagctcatcaaacagttgtttttgattactcgtaaatggtgaagatggttgcatattaaaacttgttttttcaattggtgagttttgcgtttcaagaaaagaaaatatattatggtcttgtgaatgctccgatggaggttcaccagcattattatcttgaatactttcttctatattatcgtttttttcttcgttattgttttcttcaattgtttctaaatgaggttcaatgttgggtatttcatcagaataaaatttatttttctctgtagtttcttgtgcctcattattagaatcatcgttcacaacactactactatcaactatttctacttcattttttgatatactagatttttcatttgtgattatcaaactactagtctcatctatggatgagcctaatataccattttccttgggtatttcactataattcgtatgttgaatgcttttagatttcttagaacgaaacaatcgtaacggttttttatttatgtttctgagcttaaactttagagatttatctaaagaagagattaatccttcttcgtcaagaaatgtgtcatttgctaaattgtttgaagaccccacacttctccacgattcaaaagtttttcttttgaattgatggtgtttcaccttattttcagtgaaaatttccctttttttggcgtatttattttctaacatatcttcaatctcgttcttagtgtaaccatcttggaaaagttgatccaattcatttttagtactcaaattcaaaaattcggctgcagttactgtaaattgattattcttctgaaatgaagtgtttctccctcttgtcgttggtgattctttatattcatttgtcaaaggttttagtgatttacgcaatcgatcaagttgatgtgctttacgcgtacttttctctttgtctgtattaagtgtatcccaggataaatcaatatctaataagggatcagactgtgaatctgaaacttcttccatttccacacaaaaccctcgtatcaatcgggttagttttatctatcccacagagtattttctaataaatcaatgttaattccctggtgttgaaaccatcaagaaaacatgaaagacaagaaatttgtcctaaaacggaaataaaattaaaaacaccgacgatcgacgctactgagccttgttatttaaaatttacagaatagcatgaactctacacagtcaactggggaatgaaggattgagttttacattgaatatctggtgtattctctgtttactacttggaaacactctctaaaagcgcaaacacatgtcggaatctctgagtggtcaatccgggaggagaagtcctttgaagaaaagagctgtatgtattattcaactgaaaattcaaaatgtttcacatttagtcttagttttgtttcatcatcttgaatctaaatctgataaatttaaaaaaaacgaatactaacataatttatagcatgtcacatctataccaacggctacgagtcacttattaacagcaactaaaactttgttacaatcattgacagattgggctcaattaaatgcttctgtcactgaagtttcatccaaatttgttaaattcggtgatgcattcaaaacactgaaaaggtcatatgcggcatttggaatcgatacttcaaatataccaaatataccaggtgaagtgagatctgtattagaatctaatttggttcttgaaccttcacaagcttcacttgataaatttttaccacaaataggtaactctgtagcagaattaatgcaaatgttaaaggataaacaagttgatgtaaatacaattgaggcagcacgaaaaagtggaagtatatcggcatcttcatcagtatcatcttttaggacaccaaattcaagtactaaattatcggttcctaatctaattcctgaacacaataaattagatacaccatcaaaagatttaatttctaaattacaaaataatagtaatctgatgagaagagcttctaagaggttttccgcttatcaaacttcgagtattatatcaatgcaatcacctagcttaaatggagatgaaaatcaaaataaagatacattctcttccatacccagtattacagcacaagaaattgaaaatgctaaaaaatcatcaaatatgtttgatattgattcatccatgacaatacaagaagagaacgaaagtgccacaacaaataatgagaatgaaaatgaaaattttgataatactgtgattcaatacaatcattcaaaaggtgttactaatttgatgaatagaactaaaccaaattcaaagttaatagaagataaaacaaatgaaacaggtaaaaaagtggaacaagaagaagaaacatctgtattaaataaaacagcagaaacattaagtggttcatatataaagaaaaaagaatctgtgcaagatgtcatatatcttcaattgaaggatgaagttaaaaaagttcaaattcaacttccaacagctgttgccaatctgaaaattcttttcactcagaagtttaactattcccctccaggaataacggctttccctaaaatatatattcaagagaatcctgcatcaatcagatatgaacttgaagatatatcggaacttaagtatggtgatatcatctctttgaagcaacctgatattcaaactgcaatttttcaacatgtggaaaatcaaatagataatgtgaaaaatgatattatgaatatggaaaatagaattttgaaaaagattgagaatattcaatctttacaacctgcttcaacaatcaatgttgctagttcattcaaaaattcagatgatttagaatttgagaaaaatatgaaaaagaaaatcgagaagaataacaatcaacagaagtttatagacgaattagaagatgagatcaatagaatcaaaatacatcaaggaagatctatcaaacgtgtcactgatatattaaatcaaactgtaacttcagttgaaaaattaaacgtaaactggtgttgcaacaaattcaatgtcagaaaactcatatgttaatgcatgcaagcaaaaagttagtggaggatgtgaatcgcttgttgataaactcgatgatttacaagatgttattgaattcatgaaacgtgatataactaaacatacaattagaccaagtaataagaagttggatcatatatcaaaagaaatgaataagacaaaggctgatttagaaaaacttgttgattttacacgtattgagaacaaaaatattgcatcgatgtggaacaagcaaatggctacaattgcttctgatcaaaaattcttcagagcacaagaagaaatcattggtttacttgaacaagattatcaagctgcccaagaaacttttgaattgattaaatcgattgccaaacaacttgaaaattcaacatcattaaatagatcaaaattacctctaccagatccttcaatttcaccattagatgcatcaaaactagttatggctgaagttcgatgcaattaacccaaatcacgagcaaagagttgaagctatagagaaagctgaacgtgttagagaaatggaaaaggaattaaaattcaaagatgaatttgaagaagaattgggagattttgtttccaatgaaaaattcaaacatacaggtggtattgatgaaattgagaaaatgagacaagaaaaagatgaagagtttagaaacaatcaatttggtgttgtgtaagcttgtaaatatgaaagaagatatgtaaaatatatatttatttgctacttttatgtaatatacctttgtattttaatgtacgaaatgtacctgaataaaatagtttagaattgaactttaattttttcaatgatatgtggttgtctatattcctaattaacaatttaatgaatacattgaatttattgatatcaaaagaatcatttagtttgaccatcttataagaattaacaaatttataaagaatacttttcaataattgtgataaattctttctcgatccattcaattcactgttattacatgatggatcaaataaccccttattaccaatccatatatctgcatatttcaacaaacttgaatataatttagaaaaactagatacttgtattggagcacaattgtattgagaaactagtttgtagcaaattaaattctcaacatcaatatgtatacctgcaaataaagtttcttttgttgtaaattctgttttcagtctattagcattcaagttaaattctttaacagatctagcaattagctttttaacagatctaataacagctaaatcagtacttaagaccaaaaaatcatccatcaaccttataattttcgtttccgaatggttcttcaacatttgattcaactcaattaaaaaggagtcataaactatattaaataacgtgccagataaagggtatccttggaaaacacctatttttctataatatgatctatttttggtgtgaaagcaagttttcatatattgtgatcttacaaacttccataatttcatctttagtgaatgaatatgattgatgcgtatctatcataacaatttcatcggctttctttactttcggaggtgtaacatttttcaatgaatctgagacaacgtatcttttcttgaagaacttctcagattctttagtttcatagaataaatgagtgtgtattctatcattttcagtataattatcaagtctatttctaacacatttatcaataattgaatggggaagagaatcgtatgcattttgaacatcaaatttaaaagcatatatggtagggtaacattacaatgttttttaagtataagatttttgaattcatagactctgttaacaatttcaggtagtgaattacagctttgattatcacgaatttgaaacaagatcttgttgattggtcttaatatcttcttttgatatgaataaaatagagctttctcattctggttacctttgaaaggtttaacgattagtctgaaacttgattttttcggttgtaatgctaatttacctatcatgtcaatatttgaattcaatgatttaaatgagttatttttatccttttgattcaccaaatgacgggtgaaatatttagacatgaattttttgctaattctagaccaaacatgatgtttgaaaaataacggtcttacatcttgtgatgcttctgtaacatggaaaaatgaagaaataagtttacaaatgaagttgttgaagaaccaaaatagaaatgacttaaatagttccctagcctcttaaaaactctaactttgtcatattaagctcattcacgggttttaaccagcatatatcattaagctttaatcttgtttaattgcagaattctagtttaattttttgatagatagttccgtttattagctggggtattattctcataatttttgttcgattcttattaggtaccaaaaaattccaatgggaaaatcatatagataattgtcatcaataaactttataatcatatgtttatccacagtaagtgatagattgttagaattttttgatttcccattattcatgacatatttgatcaaaaatatatggatatttcaacatattttccttgtggttgcttatcagcaatttggctaacctatatacttttctaaatcttttaggaggatcattctttcttttcgtcttaggaataccagttgatgtgaaaaaacagtaaacataaaattccaactagattctggtattggggttcgtcctcgtagtgcattgggatgaacatgtagcattcgacttattgataaaaatctttcttttttctttgtatttgtaaaatcttttggtttaatatcaccccataaaagcaagttagttgatttaaatacacatttactattcaatagaagattaataaaatgtttagttgccaatctgctgtcgtattgcttgcattgctttggaatgtaataaaattatagttgagttgtatcctttaaatgtataaattgaagcatttgaagatgtaacatactctgccctctctattccttccaaaagaacattgttaatgtttttattgatcatatattccaactaccaaatcaatgatttgaacatggtaacaaaactctgctttagatactagaattgaagggatctgtttgatttctgtatttggttctaccaatatatcatccagtattcgatttatctctccattatgcactccaccttcatatttaatgtaattagcttcatcatactcgatcaatgattgaagatactcccttagggatgtcattgatgaaaggaagtaggtgtcttctattcatgtatcgacgaatcgaccatcacatcaagatctatacttctccaaggtttgaatttttcatttaactgatcttgaatttaacgttaagtatgatatacttatcatcgataatagagatcgatgagtggaaatgttgattataaaacaggtatattttacagaaagcttcaacgaatataccacgatgctggagatattcggcctatcttaaaggattactggatctgtcttatttctcctaaactttcacctaaaatacttacactaattaagactcagttccagtatacgtcagatgatctacgacatttgaaaagaatgtataagacaactgacacttcaggtaatcattattaaatataatcattgcaccattagaatttaacgataatataaattcttacgatagtatacatgccactataaacgaaaactcttatagatgaaaaattgtactagaaaagaaacagatacctaatgaacaaaccattggacaaaaatattaatgatgaatggtctaaacagtattggccaattgtttggaaaggaaatccaatgattcaagatatgaacgaattgagcaaaacaattaatatgtctgaaacatatgcccatattgacaaacttgtacaattgagtaaagaaaatgaacaaacatgtaaatatgaaaatccaacaattgtcatatttgtcgatcctagaactaatgaaaccaaatctataacatatgatcaaagaacgtcacataatcctatcaaacatcccgttatggatgcaattaatgaaatttcatcaaatgaattgaagcgtcgacaagtggaacaaatacatgatagaaatgggaagaactatctatgtttgaattatcatgtatatatgactcatgaaccatgtgttatgtgtgctatggcattacttcattcaagaatatctagattggtgtatatcaagccatcattgaaaacaggtggaataggtaagacaagtggtcatcatgaaatgatccacatatcatgtgaattaaattggaaatatgaagcatttcagtatatcgatgaagaagtttttaagcagattaaagatattgatgaaaacatcaacgtttgaagttttcaattattaataataaattttttgatatcatcatgtatgtcataagtttcagtcgtgctatccacttctaaacttttcgttaattgatcaagctcttgtactcttctatcacgagatttcatggaatagtccaattttttctctaatttttcatttatatgtaataatcctgttataaaaccattaacttgttcatcgtcatttaaccccctattttccaaacttggatctgtatctacaacactaacaagatttagattctgtacattttctctcacaagtgtcatattactttcttcgtgtctcttctgtataattctaaccaaagcttcttgttccttcccatttaactcctttttcaattcactggctactatcttgtgtaaccttttctctcccactacttcactgagttctctatccaaatatgactccaatatagctttactatccatctctatcaaataaagaaaacacaatatcacatataaacaactttaattaataaaaattccaactttcaacaacaaaaaaaaccgtgtctcgaaatttatcatgttaatcaacactatggtcttcttcatctgaatacaaactacatccacaatgccagttataacgaaacgtaagaaaggaaggaaaccgcatgctcataaacaggaaccatatcctgatttacagcggtcaacaaatcaaaatgaaccaaatataacagaacttagttatgaaggttccttgaaaagctctaaatatacagatcctgagaagataaaaaatggtggtaatccagttttccaattcccaatacctaaaaatgaaacattaaaaccaaccatattgaatgatgaagttgatatgtatttccctcgtaaacacttcttgtcaaaatttcaaatttacaatgaactcttgaacaatgttatgctgaaatctataccaactgagaaaattattccacctaggttattcccattgccatttgttgaaggagttccatttgagaagaaaaaggcttttttattggaaaattttacaaaaaatgaaaccccaatcggtaaagatggtaaagaacgtgctaaacgggaactgtctgaacaggaacgtgaagtattagagaggtatgttcaagaacgagtgttggcaaaacaaccgacagattttttattcggtgatttgcaaaccatgaaaatgctagagaaaaatttggcagatgatgcaaactcaacacctgtaaccaaattggaaatgggtgaaatgtacaattacagtatgaataaattagatgaattacataatatgattaataaattcactgctgggtcaattgatgattgtgaaaagcaattgatagacattgaaaaggagttaaataataaatttaaaagaaaatacgtagagtcagagaaaattaaacaatttgaaacaaatgcatttgatccagttaaaagaggtgttacattagaggaatacaatgctaggaaagttcgtcctgttccacaatcacaaatacaaatacaacaacaaatacaacaacaaataccaatgcagccatcatcgcagccacaaccaccacagacaatgttcactgatagcagtatgttatatggtcaacaagcattcgataatgatgatgatggagatttcggatctcttacgaatgaagtgtttttgaatatgtagaataaataagattatgtattattaataattactaagaaaattaaaatgtacttttgttgcaaaaaagttaaataactgctctaccttgtaccaaacacttgataccatctaagaacagcattcacacttgaatatccaacagatataaatgttaaaattatattgaataggaataaaatcaatgcgttgagcatgaatcttggtgcaaaaatcttccaaaccattaaatgtcttcttaaatggttggtcataacaagtgtaaccaaagttaatatagtttgataaatcaatacagtcattgaattctccactattttagaacataatgtaattggctttttagttggaggaattttccatattaccaataatggaattgcaactgcgattaagatgaatggacctaatgtattcaaaataatagctaaatgagtgaatggaaaagaaattgtttctgtgaacataaatccagtttcccattgaatagattgcaatgttgcttgatgtccagtagtaaagaaatgtaaataacctaataaagtcatcaccacaactgaaactaaatttgttcttatatttaaaatatcaactaattcaaataatgtcaaaagttgattaacaagaaagaataaagaaagtccacccaatggtttagatacaagcattacagcagcaagaatattgagaaagaaaaggaaatatgatgaaccataaacattaccataacccagtattttagcaactttctgtatttctgttgatttgactgcttgtgatttcttttttatctttgaaggattgggatccaagacttcagtttctgataaatcaactttgacacagaatggaccacctgtccaaccaattgtacctacaaataatgaaattccaatagcagttcttgcaatagtaagtttggcacctttagtgaatggaatataaaggtatgctgtgataatttcatcgttttcaatatactctaatgtccaatagatggcaattaaaaacaggacgcttctaaaagctttaccaatccaaagtgatgcagctccttgataagaatatgatacattatagaatgattttataatatatggcaatacaattgcggaaatgtaaagtaaaacaattgaccaccaagatattttaaaattggagacacacttaccaccttgttcctctctacatgatgtgattaaggaagttagtcgtgtaaataacatgaacataaatgaatgatatgcaccaagatattttttatggtcttccttttgttggaatgatttaaagaatgctaagaaaccaaatgttgttaaccaaaatgaaacaattttatcttcccaaataatgaaagaattggaagtaaagattaatgaatgtaaaaatattattaacataccagtataagtccaaccattttgtactaaattttctctaatttgaagtaataaccagaaaagtgaatatctatccataattggagccaagataccatttgaaatacctaatgcaacacctagtaatagagcccaattgattgttaatccttgaggcttgaatacaattgaaaatgctgttgataatgcacaataaaccagaatgagaataaatgaccccattaagcattgattatttaattgataaacgacaactgatggtacaagctttgaataaattataagaacaactaatgatatgaataataatataataccaatccaaatattcaaatcgtcaaaattagcccatttttctttacatttttgtaatgaagataattgataagttataattatcatatattaataaagaatttgattctgattttgattttaattttgaccattgctcccaaattttttgataattttcatttagtaattcttcagaccatttatcccaaattgtttggtatttttcatttaataattcatcatctcgtaattcatttgaagttaatctataattattgatctgagatgacgtaagcatggaagcaattgaataacctgttttatcaccttgaaatgccttcagcaattggtgaacctaaattattgaatggaattggaatacctaaaagcattgcaattgttggagttatatcaatttgattaacatgtcctataattttcaccaccatttgaaatattatagattgaattatctggatcatcaaaatgtttaaataacggttgtttagaatacatgaataaagcagcttcaatttcatctttggattcaccaccgtgattaccagttgaatccattccatgatctccaaaaacaataagtaaagtatcatctgagattttttgcataacttgttcaacaatatcattcagttgtaataatttttgtttcattgcataatgatcaggaccatatctatgaccacaatgatcaacacctaagaaatggccaactaagacatcccaagattcttgttcctctaataatgggaatatattttcaataacaccattatcaacagaatgtaaatcccaaacatttagtgaatcatagggataacaaattgaagagttaatgaaaggagagaaacattgcagtccaagtatcatcacccatgaaggcgattgatttattatgatgatagaattgacttaagaggttatcttcccaaactgtatcaccatcaaaatttgatccagcgtcgaataaaagttggtaaagaaccagttgataaacctttaagacgttgaagggttgtagttggtggatcagctaaaaatttcaagtaagtaaagcattttcagaattgttagtaaaagtatcataaaatattgggaagttattaagatatggagcggtattaggattgggtattgtaaaatcaaatcttaaagcatcaattactaaaatgacagttttcttaaatggagatggatggaaacaagaatcgtttgaagaatttgaaatatatttagaagatttccctaatttagatagaatttcagattgttgattttgacaggttgctaaatcaggtaaaacatttcttgaaagtaagaaacctctcgtaaagaaagtcaatgcaattgtttgaagaattgcaaacaatatcattacacgaaaataagctgtatttgttgacgtgagattattgatgggacgcattttccctgccaatgcttgcctcgacagcctcatcttcatcccttctttgaattaataaagtgatcaaaagaagaaaagatgataagtcaaatggtataaaatgcacttactaatataataaattaaataataattgaaattgtgatctgttgataaacagagagaaaaaaaatattttaatttttattattatagtgagagagaaacgaatgggatgtttaagtttcagtcggatataatatattaacagtacggtttattacacgttttatatagtttagtagcatattaccagtgtcttacaatgatgataacaccctgtaaggcatcacatagtcgtttccattcatgtcgactcattttctcttgtaatagaactatctccaatggatctttaccattcaaatgtggtaatatccgataaaataatccaacaatttcacttggtaaaccttccacaatctttgtaatccatcttctctcaagtgatgatgcatattgtggttgtaaaataatgacatcctcctcttcttcattaaatttgaaaaactcttttaacatctcttttcttaaattcaatttccatctcttcagctacttgcatttgaatttgactcgttattttaacatatgcaaatgtacataattgaataatatatccataccttaataaccatgaaattgcttccatatacagttctctatgatccttagttggtataacatgtccaattgccttaggttttttactagatgcatcagatattattgctaaaaatgtttgtaatgatggtaaattaggaaatgttttattaaatgcatctgcatctgtaaatattttattcattggagctaatggtgatataacatatgtatttcttggacttaatggtaaaactgcaactgcacgtctccaataaaccagatgcgttgcaaataattgaacttcagcaatatctaatccacttaaaactgaaagtttagcaagtgattcatttggtctaatcattcgaacaaatcctgcaattaatgaatctctctccgctctgatatcccttataatatcttcaacattatccagtaaaattaatgagaaatatcgtaatgttgaatcacccccatttgttattggtgaaatactagataatgtagatctctcaggaactggtacatgtggtaaatcagggaattctttcctcaatggaatttgaaatgaattagttttaccattgatttcaatattaacaatctcagatcgtataacattatcataggtatccttaataagtcttgctaatgatgatattgatgttggatcagttacattttcatcattacttaataatttctcacattcagtccaaacatatccatttttttgttgttcatatcttaataacaatgatattcgacttatgatataatgaaacatttcatcaattctatgattgtattcaacaactggtggatccataacaaacatcatatgaaattgatacattcttccacttaaattcttatcctttttaacctctttctctcttttcctttcactctttttttgctgatgttcaccatctacctcttgttcatcttcgtcatcttcatgcccatcaatagttcctcttcgtttggttgttttcctccatgtgccatcatcattaatatgaattggcatacctaagaaaactgtatcttcaacagttaattcaaatcttgtattacacagttgtttaggtggtgttgctaaatctgcaataaaacctttatcaaatgaaaacaatttatcaccatcttcatcatcaccatcttcactttcttccatttcttttagattactgttgatatcatcgatatcttcatcgctatcactttccgtatcttcatccagtggtgttatattaatatccacttttttaggtttgggtggataatgaaacacaacatggttaccatcgtgtgtggcaatggtaaaaacaatccctagtaaacatggattgggtaataacagtgtactcattgctgttcataagaaagtcacagtctttaagcttgacctaatcgatgaaataaaaattacatgtggtgtgtctgtctctattaagttaaaaaagctatataataattgttacgtaaatctatttctctaaatgtctaagtataagtatatgttgtatttataaatatttcaccaatagttctggtgtttgtaacctaaatcttctgtgtatatttccgtatttaagatatcttcactgatcaagttcatcgaccaatcattgagaaatttatgcataccattgattatctggaaaaatggtacagattttgttaaatttctttgaacttcttcatcgaatctttcaggattattaacattcattgaaactccaaatgaatttggaaaataatgtaaattaattaaattactgtcatcagttttaatatcaacttcaatatcatataatagttttaatggtataacaatattgtttaagaaatttaattgtaataaactaaattgttcattcttattcttattattattattacttttcaaaatttcgtttaatttgatcaattttaatttatcttcattatcattggatattttaaatgaataaatatatggtaataatttactcaattctaaacaacacattttagaattattttcaataccatatatctctaaaacgataaaatcttgattattattaattgaatctaatggtggataattaataaatgtattagtctttttctctaattcagtaatgaaattagttggtttctttctattagtattaaataataaattaaattctgttgatgttaataatttccaatcacccaataataatttaacaattaaacatgaataattatttctcttaactttatcaactaatttctctaattctttcttagctaatggaatttcagacttattctttgatggacacttaataataacattattctttcttatgaaagattgttggaaatttgttgattgtagattattttggttactattgttattcattgtcatattgttattattactattgttattattattattgttattattattattatctaaatttttatcattcaattcaaaagaatttgaaaatttaacaaaaacattaaattttctcataattatttgaatcgtttgacctccaacaccaataatttgtctatggaaactttctgggacattaaagttataaattgttggtaattcatcttcaaataatcctaaacctaaaattgaatctaataaatcattacctgatatatcaactataaaatttgattcggtaaatggtaataatttaattgaaactgatgacatattgataattttaataattttaccattctttttacctgcaatgaaatctttttccttatttggcaattctatttgatattgaacaaatgttgatttaaattgctcattaataaatgaactaaattgatttaaataattagttgcaattttaatattatctgaattacctaaaatttggaaaatatatttattatcgactttcaaacatgtaattgtacaatttgaattgaaaactagtgaatcattaaaatttaaaagtttgtttatgtcaacaatataatcattattatttaatacaaattcaattttttctgaataataagttgaaaccttatttgttaactcatttaataaattttcaatttcttcggttgaattaccttgaattgttaaaatatcaccaactatcgaatttttattagccattattagtttattgttattgttggtgttattaatgttatgattattatttttttgatttaaattaatattaagtgaagatgttgatgtattaattgaagataatgaatcaaaattatttgatattggtgatgaaggtgacgtatttgaagaagctgagctaggattggataattgatttacatttgaatttgaatttggatttgatggagaatttagattagccatgatagttgaagtatttgaaaattttgaacctaaagaaggtaaagataaataacaagatgattggaacattaaattatcaaagaattcaccattatttgataatatttgatctaaaatcaaatattctctcttgattggtaatattgtaacttgtttaatgaaaggatttgaagtataatttaaaattaaatcagataaccattttttagctaataaaacatgacatcttaaacctgttaagaatattttaggattatttagttcaacattcagtgaattattataataaagttcaggtaataaatttggtaaataaatattacaattagtttgttgaatgattcttcttaaagttgataaattagtaccacaaattaatggtaaaattgaaattgaacttaattctaaataatctgaaaagatttgtggattcatatcatcaataaacagattgattttattttctgtaactttaacttgatctttaaaaccaattattgagatttcataagtaataattgaattattttcattatcatttgaattagtttcttcaataaatattgaacatttattaaaatttgaaacatttgttataaaatttaataaatctaattttaattcatttgaaacaatatttgaaatactatcattaacaaaacaatattgattattaaatttattaattttaataattgatttactaatttgagagaaattttgtaaaatatttaattttatatcattaatttcatttttaaattgatttgtaccaataattgatattataattttattataggaaagtttgaattcatttaagattgtaattataccataagtagcatatgattcattaatttgtttaattatattccttaaagctaaaagattatcataaatcaaattattttccgctggaatattattatttgaatttaagttagtattatgattaccattattagtatcatctactctccagttggataatatgagagattcgtgataagtatgtaaaggttttttaatatattgataaggtaaagaaaatgaaactataagtttatcatcagaagaatgtttttcttgattttgttgttgaccttgattttgagtttgatttttgtacatgattgaatatctattattactattattatttgatttggtatattttatctatctatatatatgtgagtgtaagtgtgttgcagttgtagatacaatttattaaggagtgactttagttagattattatattttttgaattatttgagtatggtattaaattctaaaagtaatatgatgtattaatgaatggagactataatatagttaatggaaggaaaaaactcaaagaaggggatgatgtgataaccctttagtgatttctcttagtgatacagtttattgatgtaaaagtaaagattaagtgtaatattcccaaggtaaaaaaaaagctgaccgttaatgtgttgactttaaggtaaaaaaaatattttttattttttcaaattgaaattaaaaattgaaattaaaataagtggaaactggcgagaaagtttaaatatttgacttattgcctaaagcggtaatgttcgcgaaatattttcaatctttctgattttcctcaaataaggtataattaaacggtttgccctctctctattcgtttgatttgatttatacagtgaaggctctgttatagttatgaattattattatggtattgtgatattattgtattatacctattaaaatactaaaattagcaaagaatgaatcttttttaacactatactaagtcaattgagtacagagttatataatagagtataatatctattgataaagcaaggtacatataagataaagtaaagtacacaatcgataaagcaactttaacgtttagttaacgtgttattattattattaaattttaatcttaatgattacgtcataaatttattttttaaaagaaaaaaatgtcacgtgatatattgtcacgtgatagtcacgtgactgaaaatatttaaaaaatccaatgcatgtgaaaattgaccatcgaaagataaattattgagcaaatcctctcactcaaagggcttatattagacaagggcgttgaacatcgatttcaagaaggcatcatcttttttttattattttatcttttaattgtttcttccaattgtaaactaaactcaatggatagaccagtatttagaagacgactatcctcttctacttcttcaccggttttatctccaagaagacctcaattgaagaggtagatccaaaaattcaaattcttcaattaatattaatataaatccagattcttcaattgatcttaaattaactccctaatattaattcaaattctggtagaagtagaagtcggagtagaagtaggagtagaagtagaagtagaagtgatagtaaaaatggaattactagtggtagtagtatcaatgggaacggtaatggaaattcttcctctactactgcatcaactataaatcattctttaacaccttctttacctccattatcttcaaaatataatacccataatcacaatcataatcataatcatgttcataatcatagtcataatcatagtcataatcataatcgacatttaactgatgaaatatcacttaaagatttaatactaaatgttaatttagataattctttaccaattgattattttaaacaaaatattttatccgttataaaatctttgaaaatacctaaatggaggaaaattgataaatcaaattataaattaatgcaattagagagaatctctggtgcaatgactaattgtgtttataaattatcttatggtaacttttatccccttctattaagaatttatggtgatgttgaaaatattattgatagagactcagaattacaaactttaattagattatctaaaaaaaatatcggtccaaaattattaggttgttttaataatggtagatttgaagaattcttaaataattcaattactttgaataaatctcaaattagggattccaaaattagtagaatgattgcaagaagaatgaaagaatttcataatggtgttgatttaacttatgatgaatttaataatggtccaaaatcttggttattaattgaaaaatggattctattagttgacaaacttattgaaaattctactgcttgatgagcaaactgatagtcttcattattaattgggaaagtttgaaaaaattgattttaaaatataaaaattggctttattcaagctatggttcaattcgattcattgaaaaattcattaaaattttgtcataatgatgctcaatatggtaatttactattttatagtaaatctgatgctttatcaatgaatgatgatgatgatttattagatccaaataatttagttgatgataatgaaattactaatttatcattaaataattcattttcagctcttaatcttaataatatttctacttcaactaattctttattatcaaattcaatcaataataatcatcaattacctgttgtaacggatacaaattttaaatatgatacaagattaacagtaattgattttgaatatgccggtgcaaaccctccagcttatgatattgcaaatcatttctctgaatggatgtatgattatcatcacccaactgagaattataaaactgatgaatcaaaatatccttcattcgaggaaagaattaatttattaaattcctatgttcaatatgtacctggtttagcaacaccgaatttggttccaacttcttcaagttcaaacactacttcaaatacaaccaattcaaattcaaattccacaaattcacacagtgcatcattaaatcaacgttcacattctgtcgtttcattgaaactaactgatttacctcataatgttaataaatttatataatgaatgtatttattggcgttcaacatcttcaattttttggacattatgggcaattattagcaaaggttcaatttctaaaaatagtaaacaattctaaatctacagaggatgaaaattttgaatttggtccaaatggtgaaacatataaaattaaggatgatgtcgatgtcgatagcaataacaataatggtaatgataatgctggtgatagtagtgatgaagaatttttagaacctacattagatgatgaatttgatcatttaaaatatgcattgggtaaaatgggagttttcattggtgatatgattcaatttggattaattgaaaaaagattcaattgattcaaataatcttcaatttgttaaatacttagatacagaaattttaccacttgaattagaaaagaaaaaaatcgaaagaggttttcctatttactttaatttatagatatagatagatgtgtattgtaaactattatatcatggattttataaataaactgatgaaatgacataaaaaagtttataaaattgtgtaatgtacagtgattgaaataaatttgaatctaattctattaactttcaaagaaatcgtcctcttctccattcattattttctttattttcagtttcttcaacatcatcaacattagcagttgtagttccattattcgtactattcttactctttggaacattattattaccatttatttcattttcaattgtaaattcaagttcattctttgataatttatctgcaatcattttcttaatttcttctctctttgcatttgttttctttaaaccttcaattgcctttcttgacatatccttaaaattggaagtttcagtttttgcatataatgatatatatttttcaccttttgggaaatttaaaatataacctaaatctattttacaatgttctaaaatacgtttttctttctttaataatttctttaattcttttacactccttacattagtttcactagattgattttctgcatctgcatttgcatctgtatctgcatttttctatttttgttactgatttttctgatattaaaagttctgattctaattcattaacagttttcaaagattttttataaaatcttacagctttcttcttttcgaaaaatcgaactttatgatatctttgagcattcaattttacacgttgatcgttctgtactttattaagttctaaagttaatgttttcaatgctctctcattagcaattttaacatctgcaggtaaattatctctacttaaaagtctcttaatatctctaagtttctttttaatacctgaacttccatgcattaaagctttggtcaaatccacacttgccgtagtactagtctctcttcccttccctaccattgttttgtttaatgatggtaatcaagtatcctattagtataattatctaaaatgtatttgaaaacctaaaataaaataagataaaaaaaattataatatatcagttactgaaaaattagaaatagaaaaaaaaaaaaatttttttccactataacgtcaagtgaacaaaaatggaaatttttcagctaagaaaatggatctcttcagatttataatttcttcacctgtagcgctgtttataattgctattgtttcagtaagttcaaatccattactagtgataagaactagatatttacttaatgggaaaatttcattgtagttatcaactgtataaaaactaatacctgtcgatacttactactgatacaattacctaaatcattgatccagtttgctctagtatgatttgtattgaaatgttgcaaatgccactattccttaacaataatgtttctcttgatactgatatacgagaattgctataattattaatcaatcattctttggtagcagaaactttctattgttccacttttataatccccgtgtttttatctccatactcttatatttagttatcaattcattaaactttaaacgatatacacgattatatatacaagattataaatgatatatattatatctacttagaagcaatcaagtgggatgttccttgagtgattcaaggtatgaaccaatgtgttccttctcttcaatagaaagaccaaagttcttcaaattgtttgaaaaacttatagacaaagatatcaccaactaatattctcatcacttgataaatactttgtctctctattctttaattcattatcaaaataatctatataagattgaaccttttcatgtcctttagctttttcctcttctgtagatccccataatacttgaacacctgcactaataaaatcactgttgaaaaataataaccattttaaattagttgctttctcattcaattcaataccagcaaattcaggtttggttgaattcttaataacatataagtaaatcgaaattgtttctgttaatttgaatccatcttcagttactaaagctggtgtcttacctaatgggaaaatatccttataattaggaacagtttgggtatcaatactttcaatctctaatccaacatatttacctaaatccgtaatccaattggatctgaaagtacctggtctcatataaacttttccccaaaccattgtgtctctttaattgtatataaagtgttgtctaattatagaataaacattagattagcatttataattaatatagatattggggggatattagatcctttttatgctttcaaaatattagtaatcaaattaagatgacagttggagtttattcatgtcaaagcttatttccgtcttgttattacaattactactaatcattccgttcataccattcccactgttgtttattatttacactagcaacagcgtgttatattattattacaaatcaatttactgtaactatccaaataattaagtaacttttaattcttctttaattgaactttaccatcaacaatttcaacttcatatccacatttctcaagaacggcttccttctctttatctatctcaattcccttagtttctagattagcaataaatgattgattttcaggattgttctcaagtaaatattttagacataaaatacatcgttctctaataaatggttcattaacatcaagattacaattgtttaataataaaactaaaccatcacaatctcgtacaatatcttgattcttcttatcgttatgaattaaatatgtaatcacttcaacgattattgtcttgattgatccaaattcttttttctctccatttttatcttctttgttctctaacttagcttcattttcaacatctttaagtctttttctttgtgtgttttgttcaactactatggaagaaatcaactaactctttgaggaaaatcatatgaattcaaagttttcttgaataattcatatggcaataaactagttattatatccaatgttgcaatcattttacgatgataaacttttaacttttgttttttcaattcatcaatattcttatcttttaaaacagaacatacttcacgtttcataatattaaagaagtctaaaaatatagcacctaatgcaacataatcattcttttcagataaatgttgtttactaaataatatttgacatgaaattaaataaagtaaaactgaattttcatatttttcaggattatatttttcaagtttataaacttcaattccaatttgttcatcttcaaataaataatataatgaatgtgactaataatagaatcattttatattcatcagtttcataatcttgtaatttttccatatttatatcaactgtaattttcaatatttttgacattgtctgtaatagattaataaatacttcacaatcattctgtttaacttcatttctagtttcttcaatcatacaaaaagctttaaattgtggtaatatttgcataagttcaaacttccctccaatttctcccatcttcattataatcagattcaacattttcatacttttccttactaaactttcatctctacctttagaagttttcataaaattaaatacacaatggaaacaaacaactgaaacatctaatgctttaaatctaacagtttcatcatcctcggtttcgatatatgtttcacagagataatcacttaatttaataactaaatcattatgttcatgactaaatttagaaatattatcatgtttctccctatatgcaattgaaagatttctaatcattaaaattataccttttaatattcttaattgattaattgaaaacttaatttgtttattatatgcaattatggtcagctcatcaagtaaattccaaatttcatcacattcacataattcgactgtatattcccacatattatcacttgacatcattttagatgtcatttgaacaatctcacctatatcactgattaattgacttgcatcaccctttccagtttccagataagatttaactgctactaacaatttaacttctgattctgtagacatttataagctgaactgtggttcttaatcaagaaaaatcactaaattaacatgaatcgaaggattatcaacttttcactcaaaaaaattttttgacgtgccgttaaggctaatcattgatatttacaatttttatataacttttttctttatttataaaatgtacaaaactattgatatattctatagagtatctaatacataaccactattattattcttcctcatcatcatcattcttcttcttcactgtctgaatttgaaaaattatcaatgtattttttaccttcatcatttggtccaaaccacccttcttcgtcatcatcatcctcttcttgttcgtcctctttgtctgaatcaacatccatttgctcattttcgttacatcttcaattatcacatcttcatcttcatctttattcaaattaatagctgatgtatcaattgagacgagtaagaattcattcaaataattaaccttataaccataactcactacttctttaacaattctagtaaggaacctctgtattgatcttaaaccttttgcaaatatgtgtttatttttagtaatatatttaccatgtgcagtaatcaaagattcgatccataataaattaaattcaacatgtgcactatccattgcaatattaccaataaattcaagtaatcttgaaacataaatagttggtaaatcatttgcaactagtttgatattttccttatttatagattcataaactttatgaattaaataagtttcattaagtctaaaagccattgcaattgcatttaaatattcaccgtctgttatacattgaattgtattctctggtgtaacatcaatatctaaatcaattggatcgaaaatcattgaatcatcaaccgaataaattaataaaccttcagttgaagcagcagcaaatgcattagcagttggtgaaaatccaacactcataacacgaatttcaggtcttgttgatcttaatccaatatcaccacgatgagaacctggtaaaactaaatctgatttatgattttcttcactatctgatatttcacctgatctatcaactaaatcaactgcttgaccatcaactatatttttagaatttaaatattctaatgtaccattcaattgcatattaagagatattttaaatcttttcaataaaacctcatttggtaaatcatacatacatatactattattattacctgctgcgattaatgttaaaccatcaaaactatatgcaattgtatcaaaatgtttaccacgttttgaattttcacttgaaaattcatcttctctatatctaccttgtaaaatatcttttctaccatcaatttctctaaccattctagcattttcaatatcgaaaaatgcaattttaccatccattgttgaaactgcaacttccttagagtctggtctcattgctaatgataaacattcagaagttaaatcaaatggttcaccagattgacttctaccaaaaatatcccaaattctaacagttttatcccatgatgcacttgcaagttttgcatttgcttcagtaccaaaacttaaacaagatattggaccttcatgaccagataattgatctaataattgtgatgtttgaactgaccaaacttgaatatcaaaattatccaatgaaccggcaacaacaatttcaccacttggatcaactgcaaccgatgaaaattgaattcgacttgttgaagtgaaagttctaaaatttctaaaacgaattaaatcccatgctctaactgtaccatctaatgatgatgaaaacataacttgtcctctcttagcaaatgcaatacctgtaactgatgattgatgttcatcaaatgtagctaaacagaaacctgacactatatcccaaattttaattttaccatcatcagcagcagttacaattcttgaaccatctggtgaatatgcaagtgcattcatagaatcaaaatgtccttgttgtcttaaaatataagattctgattgccattcataaactaataattggcctaaatcttttgaaccaaatgcaatccattcacctgaaggattaattgaaattgttgaaacactatttgaacccattgataattgttgaatcaatgaaaatgatggcatttcatataatctaaattcaccatttccaaaaccaacaataaataaatttgattttggatggaatgtacaacatttaacagatgattgtgaattaaagaaatttctagcaataattctccaacttaaagttttctgttcatcatctaaatcttcctcacctggtctttctgtatattcccatctaaatatagcaccatcttttgaaactgtataaatcaattcctgagttgaatcaaagaatgctttaacaacataatctttatgacctgctaatgacattttcacatgtttatcctctgagtgtaatgaaaagattcttgctgtcatatctttacttgcagataaaataaatcttgaatcatttgaccatgaaatagcagttatatcattataatgacctgcatagacacgatatctaacaaatggagcaaattgtctatcctctgctaaatctggagttttccaaacttcaacaaatctacctgcacctaaagcaaaatgagtaccatctggtgaaaattcaattgatttaacttgatttttaaaattaaaatgatgtaaaactgttctagctttaaaatttacaagaattgcacgtccatcttcatcaacactaatcatcaaagttccctgaggattaagtgcaatagctgcaatattttttcgatgttcataattaaatgtgaaagatttattgtgaattagatcgaaaactgaaactctgttaccaacaggtgataataaagtagttccatctggtgaaaagacaacgttcccctgtctataaacagttcccaaaagattgctaaacttgaaatcgctcttcatcacttcctgacactaattaagacttccttcctttgtttctataaagaaatagtgaacacttctaacagtttccagcttaaatttgtaaaagaaaaaaaattttaatactttcaatgaaatatttttttcatgttattatatgaaaaattacgtaatctgaaaaatttatttttatttctctgcatgaaagttttaacccttcaatttaattcttttaaagatctttattcatttaatacatacacaacagacagcatgggtgatgcgttatcgagtagagtcaagaacatgaagtttatgcagagtgcagataacaaaaaacgaaaagatgcaaaggaatcttcggagaaggaacaaataaagaagataaaagatctaagtgaatggagtctcccagttaatggtaaaactctaaaagttatcaaagcaaagaatgttaaaatacggaaagttggttacgcaactatcaatagtattggacccgttaatcatgttgctcttgggagaaaagttatgggaaataaagaagatgaagatgcatccaagcatgtgttaactgctatagctgttaagaataagaatgaggatcaatcatataacaatactaatgatgatgatattgaagatgatgaaaaatcatcaaagtctaagaaatcgaagaagagtaagaagagcaagaaaagtaaaaatgttatgaaagctttcaaaactaaaaatggtagtgatgatgaagataattctgatggtgatgatttaacttccaaagacttacttaatatgtggaaaaagggtaattgattcatcaatactaagcatacatgtaaacgtatagcatttttaattattaaactgtaatatattagatctataaaattttaaacaattatacattgcaatgacaatagcaatgtgattatttcttcttctttgactttttgttaccattactattatcaacttgaacaaattctccctttatcaatgcatctctcgttgcactattaatatgtttgaatctatctggtccaatatgaacacctccaaaccatctgcaacaaacaaccataacatcccaagcatccataattgtcattaaatgtaacattctaccacctgctgcagtttctccatcatcatcacaatcttgatattgagctccacttgatttatctttaattctccatgctctcattgcatgattggctcttccacatttcttatcttccattaattgtgataaactttcaaatgcttcatccactgaatgaacttctttagcaaatgcaacaaatgtggatttcctatctgtaattgcatcacttactatccatccgtctaatggatttttagtctttttgttatcattattctgtattttcttgttagatgacttcttattgttcattttagccagctcttcattttcatcatatttataatctgtgtaatctttatcctcatcttcaacaacttcaagattctcaatttgttccgttatttcattaacttcattatcagcatcattccaatgatcttcatcatctaagatttcttgttcttcattctctccagtatataatacggcatctaactccgtaaataaatcaaaaattataacaacaccctccgtatagattgaatctaaaacttcttgaaataactccattaaatacttttcatcaaatccattcttttcagatataacatctagaatatatggtttctcatcaggatactcaactggaaatgacatttgaaatgtaatatgttcatgttgtggaactttgaacttatatatccccggccctaatttttcaatacattccgggtatattgctttcaatagcaccaacctctaattccaaatcttcactttcagtcattatcttgccttatagacaaagtatcgacaaaaagaattatgattcagtaatgaaaagtgcatgaatgtcttgttgctcacttaacaccgaaatttttcaaacctttaagtataattctatttcttcttcaaactaatgacccttgaagactctgaagtacataaaggattaggaaatgagtatttcagtaatcaagattatatatctgcattaacagagtatacggaagctatagtgctcaatcgaaacaattccatactttactcaaatagagctgcaacttttttaaaacttgaaagttggcaaaatgcagtgaaagattgtgatcaaggtttatcattatctgattcatctaacaagtcaaataagaaaataattgttaaattactttggagaaaggcaatagctttgagaaatttaggcaatatagattcagctaaaagtacaataagttcagcattgaaaatagaaccgaataatcaagaattgttgactgaaaatgccattattgaatcattaggtgaaaaagtcgctaagaaagctaaaatagagccaataaatgtatatgatgaagctaagaacactgaacaggtctctaaagtgaatagcattactaaagatgaaaataaaaatgaaaatactagcataacaccaatacaaattgaatacgttgataaaatacctgacaatttctttgtcaaagaggtacattgatgaagttcatgttgtaaagcgtagttatgtcaaagaagaaccaaccaaaggaaagaaaccaataataacagaagttcccaaaattcaagaagtcataaataaaacttcaccaagtttcaattatgatgatttaacattcccacaatatccatcagtgcaatttctgatatcattgaaagacaacagtagtaaagatatacagaaatattatctttacattttaagcataccagtattgcattatcagaatatatttaaagttaccggggttgaaccgtatgtcttggatctatttcttgaatcaagtaactacgttttagaaaatgacattactgagtatcataccaaaataacggatcttttgataactttcaaacaacttccaagatttgatttgacttcaatgtttgctgattctaaaaagacgcataagctaaaagaactctttgaaagcaagttaaaccttaactttaatgattactggaattaatacaaccgtgtacatgacatggtaataactatttttctaattaataataatatgatttatataatatttataacataaactgatacactaaaagtggtatataatataagcaaagtttggttttttaaccatgtaattttggaggaatataattttctaaaccttttctcttgttaaccatctcaacaggttgaaataatgaagtaataatctcaggcatatattgatcaaagtctacatcaaagaattttgtcaaaactaatggaacaataataacagagcaaattgaaaatatattgaaaaagaataatgtgaagtaagtaatagttattctgaatctcattcttctcttgcttggtgaataaataggttttttgagcatgttttcaggtttaagccataacaataacattgaatgaatagtatcaatatatggaatgaacaataccggaatttgacagagtaaaatgaaatgtgaaattaagaaatctaatgcaaaatatgacatctcgataatcttacaaacaaattctctaaagggttgagtaaaaacatgccatcctaaacctgaagttagccatgaacctgtccaccatgctttgtttgatttttcatcctttatttccctatttaacaataatattgtgactaatttaaaaaataattcttgtaaattatatgaagcacatgcacctaagattgatcttgatatatcccaattttgacaaatcaataaaaatagaaatgagaatagataaacaaaaacactaattatatgtgctaaatttgcaatcatccctgggaaagagcttgaacaacacattattaagggcccagttgaaattgatacaacgaataatactaataacactgcagcattcataacaattggaaaaaatgaaacaactaataatcttagcaaagaatttgctggaatggtaccacttgtttggttttgagagtttgcaaataggtatgctgtaactattattaatgttgtggcaaatttggatccaatttgagcaataaaagatgaaactaatgaagggcgtaaataattagaacccataaatgtaggatcacttttagatttcttaatttttgaaccagttatggacattcttgtagaacgaacatgagaaatccatgagtctctctttgttctaacatttccacttgataaccatttcataaaactcttgtaatccataaaaaattctgtaaagttgaatgcatttggattgaaccaaaatggtgaaaagaataatgatgaaacagtagcccaaaagtataacaaactaaacttccacatgactaaacaaatgtaaagtaataacataaataaggtaccggcaaagtagaagctttcatatgagaatcttgaatataatgtagcaaatgatgttctagtagtagaaaatcctcttcctgttgcaatatatcttgcaccaccaattgccaaatcattaacaagagattgagaatagatacgacaaacaaaaacttcaaacattggggataaagaagtgaaatgtcttgataatcttgaaatacatctccaaacacctctttccattaactcttggatacataatggaataaatgaaataccaaaaacaatgaaaatagataaaacacaacgttgaacccaatcaatgacaggtatcaaattagtacaaccaaccggctttcttgcatcagtgaatggaacatttttattgtaagtacaaatgacagaactgcttgtcaatgcaccaagatgaatacaaaaaagcataaacatcttcaatgataataaaataaatacattgtttaagtggaaacctggatgtgcataaaaaaatgataagaatctatccagtggtaattgagtaccaagataaaagtattctcttgaaagtatttgttcactcatacctgaaccaattttagtggtaaagtttaaaattgaacagaatcccaaatctctacctttaccacattggaaatattcacaatgcttaattctaccaccacgcatcattgcattcattccggcatatatatcttcatttaaatgtaaacccctttgtgatttggaaacaccacctctggtacacataaaaattgtgttcaagaagtcaggatgaccatagtgtaattttcctccaacttgagctaatgttctagcaaataatgtaccaaaagtttgttctttaccagcggcaatatcacccaaaacaccaatattttcagaaaaaatgtattctctagtacctaaaattgcaactgggtggatatgatcaacggaaacagacatgtctgttggatcatatgtatatggatcatctggagattcatattcttcaaactcgttcaaaacacttctgatcttcaaacattcttctaaataattatcttgatttgcatcaactaattgaacatattcacctctacagaaaatgatagcatgattttggttatcagatttaccatcacctaaaataggttttcctgaaagtctgattcggtacttaggttttctttcaccagtacttaaaatgtcagaattaccatcaataagagcagagtaataaacaaattcgtgggtgataggatctttttcaacatcaaggtaagcaatttgaagttctggatatgttcttaataaaaattcttttgccttttcttgttcttcagaaaattctttcattctttgtaatgaagcaacaattctaaattttctacttgcaataacatttgcttcttcaatatttgttaatggagcaacatctggatcatcacattctgcagaatataataatttaatagctcttgagtaattcataaaaccagaaattgttctaaataaagtttgagatctgagtgatgcccaaatacgagttcttaaaatatactctggagtggcagctttgaaacctacggcatagaatggaacatcactaaattctttttcatctttttcatctttaaatgttctgatgctaataattttgtatccctaacaaaattatgccactcatccttataaagatttttcaaatattcaagtaaagtaatattggaaaagtcgtcttctcttttaataacttcttgaagtgataaagtaattttttcagaataatgtgggatcaaaactgaaaaagatggcatcttttctagtggcattgctgatgcaatggatgttgataatgaatgagcaaaaaatgataaacgacgaactgcttctgagtctgatttcatgtaatcatttcttgcagtaacagtttctccatcttcatgctgaataaaaaaatttggttcagaaataatcttttcaccagtttcactaacagtactttgataaattaaattttcaagatgatcaatagaaatcaaatgatctctatacattgaaataattatagaattccaaattttcaaaaccatattttttctttctgtttcattctgttgattaacggcataagagttcaaaattttcgacctaattctgtttggtaatctgaaaaacatgtttctccaaggagtccaaattgaaaccccacagtaaaatgatgtagcaacagaaaatgcagtgttccaaataatataccataaatatgtatctaagaaaaacaatactaaatctgtgaaaaataataatgcaagaataatatttgcttcttgttcacataaaaatgagccaaaccattcttcacctaaacatctattaatctttaaaatactaagttctctcactggatctcttaaacttaaagtaaggaaaaaataagattcggtgaactttgaaacaaaaactccaccccataaacctaatgatgccaattttcttttaccttttaaattgtgaataaaatttgtaaaatacaacgatggcaaataatttctttcattggtggaataataattgcttgttaatgatgataatggcacaacagaaaaatagaaaacaacaaataatgatagaataaattgtgaaactgcaattccgtatgtcaaaggagatgaatcagaagtaccagtaaaatggaaaatataaattgttgggaaggtagtcaaaatagcgcaagttgaaacaaagattaaccttgaaagaataggcaaagcacctgcaaatttccttgggacaaacactaattctaaaatcaaagcaaacaaattcaagaaactaacaattgatccagcgattgaaagagatgctaatgtagcaaccattgaaggttgattatctgcagtaataagatatctttctgtatataaagttggacaattcaagcatgtataataccaaaagacacccaaatgaatattccaaacacgattgaaatcaatcaaaacatgtaaccaagatctggattcataataagttttggaaacagatacattccaattgacttgattcaaatatagaaatctttctttgggtaaaatatccattaatttttgtttatcgtataattcaattttgtctaacccttttctataccaaaaagattgatttatatcatcataaccaattatatccttatgatctttttcattgacaacccaatgatcacctacctttgaatataactgatttctataaaattcataaagaggtgtaatagcgtgatcaagaaagctatcagttgctggttgtatttcatttgtaaaatctaatgaataaaaataatcaacgcatgttctgaatatgaaacatatacattcaggcataaatctaacattatttgcttcaccccaaatcagtaaatagattgctaattgaataatacaatcttcaggtaaaaatgagttggtggtttcaatccaatttgtttctgaatctttaatagaatacttatgattggaaagtatttttcttctttcctttattgataaatcgtgataagttggattagttgacattatatgatcttcaatatccatttgagatccaaaataccattttctataatttgagttataacctccaatataatctgcatggacacttcttaaagcctttgctggacccattcttgatgctcttgaatctaacattttcattaaatagtcaaacatatttttagtattatcaagttgaaatccaaaaatttttgagatatgaataaagatagattgaattctatccttagtaattggagcagattcaattgaccatgccggataaggatcataatgattttcataagtatcagagatacccttttcagcaaaatcatcaaagcaaaaatcattatctgaaaatttatgggcaccaaagatatcacctaatttatcaacattattccatctactattattattatgaggtgctctaaaggcactgaatggttgagctgtcttttcacttagtgcagatctaagatcgccaatattgtcatcagtacttcgcattgatcctacataaataaaaagaatgaaaataagttacatgtagtgttagtatttgtatatttaaagataaatttccttatggatatttcctttatcaatccttttttttaaaagataaggtttgaaaaataatttaagttagtaagggtcagattcatacctgacggtgaagccgtcttggatgcatagcggttgcttgacatcatatttaatgaatactgtcaattaactcaactaaagatcgatgttcttcaaaagaaagatcaaaagaaaaaaggattcagttatgaacatgtgtataattgtgaagttgccctacagcaatgttcctacacaatttaaaagttagtatttatcgatgagccatgtcaaaaattatcgtttaaggggggggggcaatttgaatttttctcggtgagtgggcaattttacagactgatttttacatagcgacaaggaatttgttgtgttggtacatatttttaatagtttgtgcttacagtgagtggtttttattgtcatataattattatagcaaggtaaaatactatcaattattagcttagtttatttatctaaaaaaaaccttaaaaaatttgttaaaaagtttgaattgttaaattattgaaaaaaagtttatgaaaagaaagaaatttttgtgtaaatattatttagtattatctttaaagtctttttagcctataatgctacttcaaagtaccaataatttgccattagttatgtagtttaaaattgaaatcaaaagaataattctatacacacttattacaacaattaaacaatagtttcctaattgggtaactcacaattcaaaaaacaaatccccagttcatgttaaaaataaatcatttttttaagcccagggtagtaccaaagtgcgcgctttcaacatggaagttgtgaaattttggtattctctattataatagcttgtcatcaagtttggaattgttgcttgatttgaaacaattagtatagttgattttgtatattttctgatcatatacacagagtgaccaaatattaacttagataataaataataatgagtgcaaacacatccctgtattccattgatgccatccttattttggactccgataaaaatagaatattcactaaatactataaatcaccacatgaaaacactgaaaatgatttaataacaaaccctaaaaagcaaaaacaatttgaagctgatttattcaagaaaacattcaaacaaaactctgatataatactgtttgaaagtcatacaattgtttataaggaatattccgatttcatcgtatacattattggtggacttagtgaaaatgaaattctgctttataatgtattacaaggtttaactggtgcttttgaaatcattcttgattctcaattagataaaagatcattattggaatcttatgatatggtcgtaattgcaattgatgaaactgttgatgatggtatcattcttgaaactgatagtagtgcaattgctgcaagagttacaaatcctccaactgaagatgttggtaacattcaaaattgatctatccgaaaaaggtttccttaatgctttcaattttgcaaagaagaatattgcagagcgtttgcaacaaggattttaaagttaatttgcttttgtttaaaactattaccccagctacaaaacattttgtatttcatatatttcatattaatatctcatattttagttacgatataaatttatatcctaaaaattcataatcattacatcattgcattgatatgaataaatatatagaagaagttaaaatttaatcttataaatgaatgttctaattaactatactatttctttttacccttagacttggatccacccttcactttaccatgtccacctttactacttttacttttatcattacttccggcgcctgaaccaactttaaacttggaagcagttagattcatcatgaaatcttgttgactcatcaattcaataatatttttggtatcataccaatcactttcttccttttgtaattctaaagtatgtctcttgaaaagttcaatagtatcacttacagttttacccttcttcaaagtacctggttgtaacttaactttgtaagcatatttgttaagggcaccccatggtgcaaatactggaatacaatcagtaacattgtcagttttatttggggaaggtaataaacccgtgatattaatatgataattctcataatcattaacaatcttggaatattcaacataatcaatatcatcagtagcatcattgtcttcattacgattttctaataatgtaattagtttggtaatttgattgatttgtaattgtctcttcttatgttttttcattgcagatgtcataacaaaggtaccattcttaggttgttccttttgttcagttttctcaacttgttttaaagtaccaataacagccattcttaattttctatcttcatcatcttgttcaccatatttctccttaatttttttcatcttaccttttttacctctaatcttagtttgtgtttgttgggatggagttggtgcaacaggtacatacgcttcttgcttatcattttcatcttcactatcagatgcgttatcaacttcgttggccttagcttcactgttttcttcagcattatacttttcttccaattcgttaagtttcttcaacatggtgtttaattcttgaatcttattagaattaccaacagttttatcattacaaaccaattgtagttcttcatctctattgatctttgcttccttgtatttagcaaaagtttcaagatcagatgtaaataataaaccagcacccatgaccatttgacatggtggtaaataattcctttccttagaaacattgatcagaccatcaggtaaaatagttccatcataatcttttttcgatatatccttaccgacaacataccacggactagtaaccattttattttcccatgcctttgtagttgataaggagaaaataccagcttgcataaatgtggttggaggaacatcttggtttttgtatggatttttaataaaaacctttaaagcaccatcaagatcgttggaaaccagaaaatctgtttcattatcaaaatatcgataataaattgtatcaacttgattatcatctctaccagcaatacataagtagccttcactagatataaaccagaaaaacttttcaaaccaatatttcaaacgtaattgcttgaattcaacattttgtttcgtttctttttcaatctttttcagatcgttttgaattttttgttcactacttttgattgcaatagcagcatttttagctgttttctcttgtttgtctttagcagatctcttcgcatcaaaatatctagacgaattagcaaatgctgattgtgtgatatcaattatgacatcaaccgttttagtcacattctgttttttcttattgtcagacttcacactattcttgttttcatcttctgtttcgttatcatcatcatcatcatcatcagagtcagaatcggaatcactggaaccccaatcagattcatcatcttcattagagttagaaacagagtcatcattgttttcatcaatatcaaccaaactaacggtgatttcatttttgattaaatttagcgatttaatcattttagcaatttcatttcctctagtttgttcaattttgatcaacttttcaatattcttccaatccatcttttgatcaagtaatttctggacagattctttacattgttcaatttgctcattataaaaattaattaaataaccttttctaaagtttaattcttgaacttcatccaatgcttgtaatttcttttgatgctcatctttgacaaattgaagcctcttttcaatattagcttgttgagtttgacgacctaatgaaacttttgtcatttcaatattggtgaagaattcatcaaccgttttattgtaccctttgatacattcaattttcacaccatccttaattttatgaattggttcatatggatggaactcttgatatacgtattctaagttatcaggagaggcttcaacttcttccttaaataaaggatttttcttgcttaagatgtatccatcaacttcaccaataggtttggcaagtaattctttatatctttgttggcactcattcattgctttaacagtagattccatcaattgttcatcctctaataattgtaaacaactagttgaaggtttgatatcattatttagcatttgaatatgaattaaatctgatgataagtatgctgaatgttggaagcatagtttttcaacagataaaatcttctttttctctctttcagtttgtttagtatcactgatccatttaagaattaaatccttatcataaacttcattatgtggatcaatgtcagattcattaaacaatgttttatcaaatatattataaacagcaccaatatcatactgcccctcttgaacctgtccaatagcttcaacaaatctatataatgacataattttcaaatctgcatctaaaagaataatatttccggcactgaaaaattcaaaaactaagtaatataaaccatcactgaactccatgacaacaattctgtcatcacctacttgtttaacattagtgagtctcttagccttcaaatgttttcttaatttagttgaaaaattcgatggttcaggcaatgttggtctttggaagtcagtcaaatataccttaaatccggactctaaaacaacattaaatttagagtctggtaaactgaatttcaataaaaatgatctattgttgactactaagttgtatatattctgaagtctatgacctttgatcttactctctaattctgggataagaattttcaaatctaatgacgaaactctttgcttcattttatttataatttatgtgttttgcaaaaaatataatccccgacacacaattttcaaaacttctataaacttaaaccaatatatttattgattcaatagtactgttttaccgaattgatagaaagggacggaatgaaaaaagagaatgttactcatcacaaaagttcaaaacgaaggttggtgaagttgaactcgcactacacattaatttgtatggaggaacggtaaggttaattatgggggaattgcttttcctatattatagtgtgttagttggctgaacaatacaatacatagacaatttaatgcccaataaaaccaaaagcaagacagacaaaccagtgaagtcaaatgaagaatatatcgatactatagtttcatttttaaaaaagaaagatgtaaaagttgcatttttcgttggagctgggatatcaactaattgtggtatacctgattttagatctcctaaaactggtctatatgctaatttgaaaagactcaatttaccataccctgaagctgtttttgacatcgaatatttcagaaagaaaccaaaggcattttatacacttgcagaagaattattcccagggaagtttgtaccaagtaaatttcattatttcattaagttatgtcaagataaaggtttgttaaaacgttgttacacacaaaatattgacacattagaaaggaatcgccggtgtttcagatgataaaattttagaagcacatggttcatttagtggaaatcattgtattgaatgtgatcatgaaatgtctgataaggagttacgtgaatacatggataaaaatgagataccaacatgctttaattgtaaaggttatgtgaaaccagatattgtattttttggagaggcattaccggctaaaatgtgggatttttgggaggaagacatcgatgatattgatcttgccattgttgcaggtacttcattagccgtttatccctttgctaatttaccagcagaagtaaataaaaaagcaactcgtgtgttaataaacagagagatatgtggtgatttccaatcaaaacccaggaaaacggatatggttctgcaagaagactgtgataagattgtggatttaatctgtgagagattagaatggtctgctgaactagaagagctgatagttgaaggaaagaagcagatcaagggtgaaagtaccgacaaggaagatgtttccgaaaatctcaaagtactggttgaagaagttgctcctgttcttaaggaagatgccaaagaaagcaccaccactaagaaggaagaagacattgacgaattggcagaagctgttgataagattaccattaaatagtacaatttccccttttgcacacctttttttttgcttttcattaatttcatttcactacattcttacatttcttatagctttcaatatcttttagacttaataatataacttttaactactcaatcagcaatctatctactaccatggatagaagtaaaactcctgcttatcattcattatatgattcaacctctaatctggcaatcggaaatgtttcagcttggaaaccgacgtgggctcagccaacggcgatttcttcaaagagatcaagaaatattggaaatttcagtaatgttaataattcaactgctagagggaaaagtagagctgagacatcaaatgaaagagccatcacagcccaatacacaggggtattaactgcacagcatgtaaactccgttgtgtattgtgctattgcagaatcaaagacgtgctctccttcagttggtatttgtatgattgatccacatacaagtttcatgagattaacagaaattttagactcaccaacttttgttagaactgtacataaactcttagttcaagatgatataagattattggaaatattagttccaaatagttatcagaaatctaaatcaaattttgttaaaattcttacagctaatattcaaagcaattttaatattaactatattcctgatcatttatttaaatacaatgaatattcattgaattttatttgcaaaaacattgaagagtctaaaagaggcccaatgaaaatagaattaggaaacaaaaagtattgtctttcttctgcctgtgcttgtatcagttacttggaaacattaccaaaccattcctttattcatgaaaaatttaatattaaatacgaatcatccgaagactcaatgtttattaatgcatccgctatacaagacttggaattgttaaatagcaattccatcactaagacaggtaaaaaagttaccttgtttaactacttaaactcaactgttactaaaatgggtgaaagacttctcaaaaacaatattatccaaccactaacaaataaaacttcattgcttttaagatttgaaacagttaaggaattgattgctaacgatacaactgttatggatttgagaattgaaatgaaatctatggatagatttagataatttattctcttatctttgtaagaagccaaagataaacactgaagaggtaaatcaacaaaaattaaattttatattacttatgaaaacaatgttgatgaaaatagttataatacgagaattaatggaaccacttaatagcagattgttgaaagaaattcttaacatttttaatcatgaagatgtcaacaagacattagatctcaccagtgaatatatcaatgaagattgtacatgggttagcaaaccaatcgaattgagaaatcaaaaatgttatgctattaaagttgggtacaatggtcttctagatgctagtaggcaattatacaaaactttaatcgatgaagtattgaaagaaattgatgatttaagtgaaaaatacaatacaccattagaaaatagatatgataagaatagaggattttacatctttataaaagatttttcaatggatagctttgaagagctggaaaatcatccttttattaattgcatccaaagaggtcacaagtagttgaatgtgttactatgaatattactaagctcaatttaagaattgattcagtattaaatgaaatcttcttaatgactgaagataatgttgatgaattaattcataaatgccggaaaagtgtgtcaacatttttcattatttctgaagctgtttcactattagatttaatgtgcagttttgcagtcgtttccattaaaccacaatacgaatcttatacttgttgtgagattgatgataataatgtgattttaaagaatgttagaaatccactacttgaacatctatttcacttctgataaaaaacatgaaaataaagtaataatttcaaatgactgtaactattattgataaaacatcccgagttcaaataatcacaggaccgaatatgagtggtaagtcaatttatatcaaacagttttgtatcaatgttatattagcacaaattgggatgtttattccagctgaatttgcaacaatgaaaatttttaaatcattattcactagaattgccattgatgctaatacacctaatttatcaacttttagtatggaaatggttgaaatgtctttcatattacaaaacgcagataaagattcattaattataattgatgaacttggtagaggtacaggttataaagattgtatggcagttatgtattagtattattgaaaaaaataggaatatgggagccacctgtatgtttgttacgcattttgtcggtatccctaaaattttccaaaacaaaccaggagtttttgagttgcatatgggtgtttcaaaggataatactataacagaggatgctaaatttaaaataagtccaggcattaattgggtttcaggatatggaattgatatgattaaaaagcatagtttattccctggatgagataattcaagaagctgaaattttatctgataaaattaaaatatcaaaggatgcatcaatgattaattcagaattacaaaatatgaagaataaacaaaacaaattgatattaaactgttatgaaatgcttaatcatattgtacataatgtacccgataatgaattatttgcagctgcttcccaattagaagactcatttattgctaaatatgaagaaattaatccaaatctgggtattgatgcagatgataatgataatgagtctgaaataagtgaaccaaataaagaagccactaccattgatatatatccattgaaacctgtaacattgcaacaaccaaacacaacttcattgattgactttacttttgctcgttaacttatacagttatcatggagtatattacgtaatatcatgaaaaaaaatctatttcccactctctcttcagttgtttaaaatatttttaaccttggacttgttacaggtcgttatttcttgtttaaaatatctctttcaaataatttattagtcgtttgtctattttcattattttcatatagtaaacaacacttgttttttttaaaaaattcaccaattgtgtattattttcctgtattttgattcaattaccaatcttttttttgaacaaggatggattataacgggaaaagaactttcagtggatcatctgttgattcagcatatttaaacagatacaattataataatttacctagttttgcatcatcaagtaaagaaagtaaacaatcatccaatggatttaatgatgcaaataatggatttatatcatctaatacatcacttcaacataatatgaataacatttcttctgatgaaacatttatcaaacataaattaaatgaaaaggcagaactaccatttgttccatccaatcatccaataaacaagacatttttcacagagagtagattaccacctaacgtaccaaaagtttctaaaccggcaactaatataccttcatataatgagaaattttctgagaatcaatttaggttcccatcacaatcattatttggatcaagagtttggtcatcgggaactgatgttccatcaagattattttccaatcgtagttatctatttaatccaaataagattaatgatataagaaaggagaaaaataatgcatttatttcaaatgatataattaataggtaagacatatccttattcacaattcattcatttaatgattaatttagggtatcttatttatatgttattaaataaagggattttattggataatttggttattaaatagtacgattgcaatattagttcaataaaatacgaacaattccaaatcctgaatggaaggataataattaatagaccattaagtacatcaacatcattatcaaatgatattgatatggcacatagtactccaatgattaataaaaccaagatgattttccaagataatagagaagtaaatgctaaacctaaaaatccattattttatgagaaattaagagaaattaatgaaagagagaatggaaaagtagttaacgaagataataatgataacaatgaagaattagccaatagtactgagatattaatgaatgagagagatattgaaaatcagtcaaaaaccacaatatcaatactggtacaagatttttcaacaataacaaaactaatggtaacccagtcaatttagagaattatttccttaaggccgcattaaatattgataaaaggcctaaacaagatttatacaagaaatcaaatgaagttaaaaagaatttgttaatgatgcaagaacgtcaaccaattgttgaaataaatcgtgtaaataaaccaacatttacaagatcaacaactagatttcaagatttagagtggttaaaggatgatagagatgattatttgaaataatttagaatcctaccaaacttttcaaagaatatcaaaatattatagcagaacgtaagaagatgcaacaattattacatttatctaaattaaaggaagcatggattaggtatacgaccattaaaggaagaacagaatagggaaattgaattaatttggttagatcaacctgaaggtacattaattaataaatatcgtattaatataacatcaagagatttatttacattaagtgatagacattggttaaatgataatataattgatttttatttacaattagttaaagattatgttatggaaaagaaaattaataaggtacatgtattcagtacttatttttatactacattaaaatccaagggttatgatggtgttaaaaaatgggctaagagagccaaagttgatgttaatgaaatggattatatatttgtaccagttaatttaaatcaaagtcattggacattagcagttattgataatcttaataagaattttacatatgttgattcattattcggagatggtactgatatattatatttattaaaggaatatatggagaatgagaccaaaaagaataatggaggtgaattaccaattaattttgatatttataatatcaacggtaattatgaatgtccgacacaacaaaatggttatgattgtggggtatttacatgtacagcagttgattttattgctagaaatagagaattagattattcacaagctgatatgtcattattacgtcgtagaatggcttatgagatattacacggtgaactgttaaatcattaacacaacataaaatataagccaccaataatgaccgtaaatctgtaatttgtataatagaagtgatgaatttttaaatttattgttctcaaaatttttttatgtgggctgacgctatgctccgtaatttgaacctcagtcttggtatttaaatataaactggtaaaacactaacatgattgaatatctaagacactgatatgagcaaattaataataataataatcgacaatgaacggcccaccaactgatgcactttcatatattttatcattaccaagaatttcaattaaaagagttgtacaaaaatggaatgttgttttagatattcaacaaacagttcgatatgagatttacaatgaagaaggagtacaaattggtatgatgcttgaacgtagtacaggtaaatttgctgcaattggtagacaagttgagaaaactaagagaccattttgtattgatttaattgatatgcaaggtaatatattattaagtattacaagaccatttaaagttattagatcacattgtaaaattctaattccatataatggtaatggtaatggaatgtattagtttcacagagaatggatggaaaaaataataagagagaagttgaaagtattgaaattggtgaatgtaatgagaaatggactgtatttaataagaaatatgaattagttgagaatggtagattatttggtaagattaagagtgaatacctttcatgggaattcccaatatttgatgcaaatgatggtagtaaatgtgcacaagttactagaagaatgtgtaattggcaagtagagatgttttcagatggtggtgtttacagtttagaatttaatcctaatggtagtcataatttagatttaaataagagaggtgttgtgctatcaactgttgtagccattgactttgaccagttcagcttgcacagtaaggatgagagtggatttgataatggttatttttataatagagcattccctttcgcgggtccttagtttatttcacttttgtatttgtatttgtataattaagaggacactgacaccataacttcctttctagtgggtaaatgactagagatatgattgaaagagtaactactgttactccaatgctcactccaatacaggagaaagtcatttttggtgtagatgtttgtaaatactacaagaatcatacatccaatgataataataataataataataataccactaccatcaataatgatataacatcagattcgacaattgctattctgatgaaattaaatgataatgatacagattttattgatgaatggttaaattctaaatcaattactaatgaattcgattatgcaatcttactctcaattttatctcattatcaatcaacttaatcatggaattgatacaactaatattaataaaattgttattaataaaatcgtcaatgtagaaattggttcattacctaaattttcaaatattttagcttgggataaacttaactgatatctctaattatctgaataaaacaatttttgtcaatgtttcaaattatgataattttcaaacaactcttcaatgaaattatctctaattctaattctaattctaatgctagttctcatgctaattcaattttatctaaaattataatgttctattttggtttcaacctatttcaaaataatctaaaagaactcgacgttttcaaaaagaaatttaataaatttcttgcagaggaacaatctaaatttaaattcccaactgctaatcaatcaaatgaaactgatatcaataatttaatgattttgacaagttatatctttgaaaatttctacaattgatatttatgatattataagtaaatatatttatatttcatatcaaaatattccaagttatgaaattatggtcattagtttcaatggaaagaggttcaattgaagaatcctaaggctacttttaaaacttatttaaattatgttaaagataattacagttaaaaataatgatgaatattatgatttattagatataatgaaaacttatatttaccttattgaaaaattattctgaaaatattgaaaccgttgttgaatatgatgaattaaaacaatggtttaaagaattaaccaactattgaaaaaattatttactaatataattgataatgataatcaaaattatagtgatagtttaagaagagaaggtatgataatttataattcaatttgctgaaattcaagaaaattttctaagaatggaaactaatgcatataagaaaataaataatgtttataaaatggtatcaaaaatgtcaattaatgattaaagatattaatacttaatgaattcctaaaacatgataaagaattaatttcccaaatttattataaacaatcatattaccttcataaatgtcaaaaatatggagaagtcaattaaaactgagtaaattagcaattaaaaattctccaaatgatttgaaatatattaatcattatacaaaattattaacaggagatgaagataatattgaacaatcattaattatttgtcaacaagttattgaaacaattcataaagaaacagagggtgggaataataacgagaataaacctttcacattcattcaaatggaagaaagatgcaattgaaacttatttaatatttttaacattattaggtgattgtgcaattgatgcattaccatcatttttcagtattgttaatacatttttccaagatacaaaaatattaacattaaatattgataaaaaatcaaaaccgattgtacaaagtgatgatgcattatctgatgcaacaatgacagctgcaacttgtacaaattatacaactaatgaaagtccaaaaagtttaagaaaatttttacgtccaataactaaaccaattcatcttcataaaagaaaagaaaatgagagaccaacttccaaatcttccaaatcatctaaatcatctaaatcttcacgtaaatcattacaaaatgaagagaatcataatcataataatattaaccaatatactaatgaaaatgactttaatgaacgtaaaataatgagagatatttggttatcagtttcacgtattttccaaaaatgtgatgattatgaaaacgcactgaaaagtgtcgaagaggcatatcaatatgctgatacagatgaaggtctatgtgctgtttatgcacgtaaaggtattgtgattcatggtaatgataacggtaatgataacagtaatactgtccgcgccgatgcgtcgacagggatgaattggattgagagaggtgtttctattattgataacattggagtacgtaaatgggataaagatgaatacgaagcattattagaatgtaccattgcatatgtacaactcagtggagatgataacagatatcgtagtggcaagttactaagagaggtaagtgaactcgttgcatgtggtgattcggcggcggtgcagctactgttaatgagtgaaattaggtggagatgaaaatgaaaatgaaaatgaaaataatgcggcggtgatggttgcagatgcagaggaaatagcggtcaattcatggcatggattacgtattttatagattagtattagttagtatttattgtatataggtaaagctcatccttagacagcatatatacactatggagactgtagatccaggactggcattatttaatatgttaaaggcaaggagtaaaataatttatgatgttgaattattacgaaaacttgaacattcaccattagttatggaaggagattattggaagtcagaattaccaaatatagaattttacagattaaataaacctgaacgtcgtaagtccaatagtagtagaagagcaagtgcaggtgcaaatgagagggaagatagaaaatctcaaagagctagacaaagggagaataagaaaagaggtggtagtaataataataatcataataataataatattccaaatgttaagatggaggaaatgccacaaacgattgaagattttgaattatggagaatgaaaatgagaggagaggaagttgtagtggaagaagatgaaggagaggatgaaagtaaattaagtgataaaaatgaaataaaggaagttgaagctaaacctgtattcagtgttgatgatcaatttgatttttcattaaatagtaataattcaagagtttttggtaaggatgaaggtagaaaatcaagattatttgatattattgataaaccaattaatgaacctataagtccaacaattaatcaacaatctgttcaacctattcaatcagttaataatggatctaaaaatgaaatgtttttccaagaattaatgaatagaatgccaggaggaacgccaggaggaatgtcaaatggtattccaggtggattgccaggaggattgtcaaataattttaattcaagtccaaattctaatattaataatatgagccctcatcaaaatatacatccaaatcttaatcaagatcaaccaccatcaaaccaaccacaaaaccaaaatcaaaatctatatcaaaataataatcaattctcaccatttaatatgccacaattcccaccagatatgatgcaaatgccatttatgtttcaaaatcaaatgtcaaatcaaatgccaaatcaaatgaatatgaatatgaataatatgaatatgaataatatgaatatgaacaacatgaatatgaacaacatgaatatgaacaacatgaataatatgaataatatgaataacatgaataacaatcaatcacctatacaaacaccaatacagaataattcaccatcacatacaccatcaccatcacaacaatattcaccattacaatcccaatcatcatcaccttcaatacaatctaattcattaccaccaaatcatccattaatgatgttacttaaacgtaaatctaaaccattataaatatataaattcttataaaatatttttttataaaactttacttaagttatataaacaattaataatttgaatattttcattacaaccaatacttattagagaatctgatttatataaaatttgtgaaattttatttttttcaattgaagataaatttgaatttaataataaatttttatgtaatgaaataagtaagaatgaagcagaataaccatttttaattatttcattctctgtaaaagttgtaattttatttaaatttttcaattttaataaatcaattaaattatttataattgaatcaggtaaataaccgaacattgtctttatatcaattgattgattatttttcaaaattgttgaaactgattgtaataaattaacagctcttcttaaatcaccttcacaaacatttaaaatatcaataattaaattattattaattgaaatattttcactatttgcaataaaatttaatctttcaattgcagaattttcatctaatggtctaaatctaaattttgaacatctacttgctaaggggtcaataatttttgtaacataattacaaattatacaaaatcttgtaactttagcataagtttccattgttcttctcaatgcagattgtgcatccattgtcattgaatctgcttcatcaagtataattaatttataaggtggacaaggataattttgtaaatcttcctttgaaggatttgtaattgctaatcttgcaaaatttttaattctatctcgaactattgaaatacctctttcatctgaagcatttaattcaagtactcttgatgacattaaatttggtccatataattgtcttgccattgctaaaattgttgaagttttaccagtacctggaggaccataaaataacatatgaggtaaattagctgtattaagagatttctctaaaatctttgtagtagttgattgagatgagacatcctttaaagtctttggtctatacttttcaatccacggttgatccattgctgtataaagggtttgtttaaaggaaataaagtgttgattccatagtaaaatgggttttatacataataaatcgcgttaattttaacatggtgtattcatgttgtggtaaaggtttgtttcttaatagaatatatagaggggtatagaacacataaacacatatacatatacatagacaccatggaagaatcagggaagttacctattagtagagttaagaagataattaaattagatcccgaacatatatcatcaactgaatcagctaattatgtactaagtattgcaactgaactatttattaaacaattaatacaagattcacagacagttactaagagtaataatagaaagaagattgtttataatgatgtacaaaaagtagtatcgagtgttgatgtttatggatttatgagggatatagtaccaaagagagcagcaattggagatttaatgaataagggattaattaaattaagagcagttgatgaagagaggttaagtagagaaatgcatgaaaatatgaatagtaatgggatagaggaaggagaagggtgaaggagacaaagttgatgagctatatacagagtctatataatattgatattgatatataaataagacatttaataataattaatattgatattaatatttttctatattaccatctttttcaaaagtaacattaccagtattaatatattctttaatttgatttaaccaaagtcgaccatcagttataccagtataacctttaaaagtatttttaggaattggaacagaaggagaaactaaaggtttaagaggagttgacatatcttcaggtacaacaaatgtacgtactctattataattaatatcataggtaccaacattatttaaatgaccaatacctgaagatctagtacctttataaaaatttttgttaccttgctttgttgaaagaggtaatcttttattacctgcctttgattgaccatagaagagagtaccatctttataagttttccaaggtcttctaagaagagtttgaggagtagaatggaagtgtctaacagcaacagtgttcattgtccaaaggaagtactcttcaagatataatgtttaatactaatactaatactaatagtaaagaaatggacaatttgaaaaaatttacttaatgtttccttattacgtaatctacacataaacttcacctatataactatctttactatctttattactatctttatcatttaaggtcattgtacaatcagcattgaccttctttaacagtgtattgactgcatctatattgataccatcatatacactaactgctatccattccattgcaattttaaattcttcctctcctagttgtttacttagtgtattaactaataatctcataaataaactcgtatcctctaatggtatggtgatttcatcattactattattattaatattcaattcacttatactattcttacgccatatccttaatccttcatcatagatacccctatctaatgaatccattacaattattttctcatattcaccttcaattatttctttaactatttgtttaataaataatgattcatatcctggtataattggactcagtaattgaattacatcaatatcctttttaacattacaccatttacataatggtgtatctcccttttcattaatgaaaggatataaatatttaccatcaagtggaatcttattcttattactactattctcaatcatagtattaacagcccattgggatacattccccatcccaacacatggtattataattgtcttcatattgtctatattgtctattattgcctttataagaagaaagtgtcgtataatagtactaagtaaaaatctcgctctcttataaatttactatgggaaaaaaaaatttttaaaacttttcactttttaaaccttaatgataccactttctttatagcaatgaacgaatcttcctcccttgaaacactacgtgatacccttataaactcctcaggcttcaactcctttatctgatagatttagagctttattctatttgaaatctattggttcaaatcatgaaaatgatccaaataatgctcaattagcaattcgattatatatcacaagcctttaatgatgattctgaattacttaaacatgaagttgcatattgtcttggtcaaactcataatttaaatgctgctccaactttaagaaatgtattggaagatttaaatcaacaatgtatggttagacatgaagctgctgaagctttaggtgcattaggtgattctaactctttagaattattaattaaatattttaatgatccaaatgaattattagaaattaaacaaacttgtgaattagctattgaaagaattaaatgggaaaattcaaaattatcaaaggaagaaattttacaaaaatctttatatgaatcaattgatccagctccacctttaccattaaataattcaactgataaaattgataaattgaaaaatatacttaatgataataatcaaccattatttcaaagatatagagcaatgtttagattaagagatttaggtactgatgatgcatgtttagcactttcatcaggttttaatgatgattcagctctctttaaacatgaaattgcttatattttcggtcaaatatgtaatccaataactgttccttcattaattgatgttgttcaaagagattatgaagctccaatggttagacatgaagctgctgaagcattaggttcaattgcaactcctgaaactttacctgtattgaaaaatttattaaatgataaagatgaagttgttagagattctgcaattgttgctcttgatatgtgggattatgaaaatagtaatgaaattgaatatgctaaggtatagtttattaaataatttctaatatataaactttttatataaaacactaaagactaattattagtacggaatttatatccacattttgtacatgtatagaaaacagttgcaccttcatctgcacttcttaattgtaatgtatgatattgcatttcatcattaccacattgaggacatttttccttaattgttgcaccatcttcaacttcatcctttttcaaacttgtcttaactaatgattttttacttttcaaacttgatgggaatgcatccggtgatgtatgtgttataacttctaatttactaaatttaacatgcttcatatgatgttgaacaaacttcacaaactaaatgttgttgatgtgatatagaatctaataaattcccacaggaattacaaaatataagtgatccaatagcagacattatttattatattatttagtatatgatctacttacttgtatagtaaataaacttcaaagaagtaaatctgaaatgaaataactctattcttctattaaaagtgaaaaaaaaaaaataaaaaaaatttatcaccaaaaattgtcttacataataatatcttcagttgaaaaatatcgtgtacattacacttcatggacacttcaatatatatcttgggttcttttcaaaaatcacaggagcaataatgtcacatcaacaaatgtctatgcctatgcctgacttatctaatgccatcatggcacaggatgaaatgggtcgtcctcttattattgttcgtgatcaatcaaataaaactaaatcatcaggtttagatgctttaaaatctcatattcaagcagctcgtcaagtttctgatattttgaaaacttcacttggtccaagaggtttagataaaatcttgatatctcccgatggtgaaattaatattactaatgatggtgcaactattttatctgaaatgcaaattgaaaatcaaattgctaaattattagttgaattatcaaaatctcaagatgatgaaattggtgatggtacaactggtgtcgttatattagctggtgctttattagatcaagcattaaaattaattgaaatgggtattcatccaattaaagttgctaatggttatgaaaaagcttcacaaattatttcaaatcatttagattcaatatctgatgaaattaatatagataaattaaatattgagaataatttacttgaatcaagtgatttatttaaagctgctaaaacttcacttggttctaaaattgttaataaaaatcataatcaatttgctaaattagctgttgaatcagttttaaaaattactgattttaatagaaatgatgtagattttgaattaattaaattacaaggtaaagttggtggttcaatatcagattcaaaattaattaatggtgtttgtattgaaaaagatttctcacatcctcaaatgaataaaaatttaaataatgttaaaattgcaattttatcttgtccatttgaacctccaaagccaaagacaaaacataaattagaaatttcaaatgttgatgaatttaaaaatttacaaaaatttcgaatcaaataaatttattcaaatgattcgaatcaattaaaaatgttggtgccaatttagttatttgtcaatgggggtttgatgatgaagcaaattctcttttattatcaaataatttaccagctgttagatgggttggtggttcagatattgaatcaatcgcaattgcaactaaaggttcaatcgtttcaagatttgaagatttaactcctgaaaaattaggttatgcagataaagtttatgaagttgaatttggtactaacaagggataaaatgattataattgaaaataataatactaaaattgatacaaataaagttaatacagttactaatttaattagaggttcaaataaaatgattgttgatgaatcaattagatcattacatgattcaatttgtgtcgttagaaatttaattaaaaataataaaattgtctatggtggtggatcagttgaaacttcatgttctctgaaaattcatgcaagaagctgataaacaaaaaggtattgatcaatatgctttccgtgcattctctcaagctttagatgtaattccaatgtcattagcggaaaattcaggttataatccaattgttgaattaactaaattaaaggctgctcaagttgcaaataataatcctcatcttggtattgattgtcttggtaataataataataatatgaaagatttattcgttattgaaacttttattggtaaaaagcaacaattattattagcaacccaacttactagaatgattttaaagattaataacgttattatatcaggtaaagatcaatactaatactaatagtgtcttaattatataacttctaatatctatacatatctatatattacaaactaatcatctcctttacgtaacttttcaaccatcttaggatcatagaaacttgaccatattcgtgcagtacttgtcattccagatgtcgatgtgttgagtttaccaatagatttctctaatgcgtacatactattaattgttgaatccattaattcagtcacttgtttaatagactgagctcgtagtttcaaaaataatggtgaatattccttaccattttcactaccaacatcttcattcatttccttgatattacagagatatatctgattcaatagaaaaaacgaatgattgcaattgtcatgcatcatcttaaatttaaaatactatatttacttttttgccatcctaactttcttatctaagttatactttatttccttctggcaagtaaccatgttcagtacattacgtactataaggttaatcacacctaaatactatcatccatcaaagtcaattcatcaacaattgagatttgcaacatcttatagtggcagatccccagttaatgaaactacaattattcaaaatacaaattttggtgatcaagcaaatattaatgaaactggttttattttaaaacaaaaaaataaaacaactctttatattgatcatatttgcccaccaaagagttccaaatgggattataaacaatttatagcaccattgatttatccaacaactgttgaaggtataactaaatatgttgaagatttaacatcatcatatcaaaatgttgaaattataccagtcccaagagatggtggtgcatttgtgacatttcaaatgccagctgcaacaactgctaaactttataataaatcattaatttataatcttaatgaaaaattatccaaaaagcatagatttttactgagattaggtattttcccagttaatggtgttccatgggttgaagatatgggtagatatgcatcacatactttaaaagttaaatttgaaggtgatgaattatcacaagaatctttatatgcaatgtttagaagatatggtaaaatttctgatatttcaattccaaaacctggagatatggaaagagttgcattagttacattttggacatctagaagtgctatttgtgcaagacattgtttaacaggtgcagatattggtggtacaattgttcatattcattataagaaaagagttaatgatcattggttaccatcattattaagagatcatccaagaattgcaattcctttattattagcatttgctgcaggtattgcagttttaatttttgatccaattagaagttggttcattcaagaaaaaattaaaggtgaattagattggaataaacattttatgtttaaagaaatttggaaaggttggattacaactagaaataaagttaaaggtttattaaattatcaagaaaaggatgatgttgattgggaattatggagtgaaattgatgatttaatggaagaaagaaagaataaggctaaagatgttaaaatttggttggaggaaaatgttaattcaatgattgtcgttcaaggtccagctggtagtggtaaaagaaatttagttagtaacttgattttagaggatagagagaatgttctctatattgattgtgaaaatattattaaatcacgtaaagattatcaattaattcaaaattttgcacatgaaattggttatttcccagttttctcatttttatcaagtatttcaagtttcgttgatttatttgttaaaagtttaacaggtcaaaatgctggtctgactgaaactaaggaagggcaaattcaaagtatgttaacattatcattaggtgcaattagagatttatcattaactaattatcatcatttactttcatcaagtgaagatttttatatgaaagaagaagatttcttacaacaaaatccagaatgtaaaccagttattgttattgatagatatcaagcatcaagaaagaaaaatcaaaacaatgcttttatctataaatcattagcagaatgggcagctaatttagttcaattaaatattgcacatgttattttcattactgatgatattggatcaattcaagaattaattactgcattaccaacatcaccattaaagagagttgttttatctgatgcttcaccaaatgcagcaaatgtttttgttaatcatgcattagctaaattccctgaattccaaaatgaaaaaattcaagaagaattatcaacttataccccattattaggtggtcgtatgagagatttacaaatgtttgttcgtcgtatgaaatctggtgattctccaaaggaagcttatgatggattaacacaacaagctgttgaacaattatcacaagttttcctcacaactaaaaaagattatggttttaatatatcacacgcatggcaaataattaaattattaagtattaaacctgaaattaattatgaagatgttttcttattaccaatgtttaaagcacaaagttatcaaattttacagagtatggaaaatgcagaattagtcagattaattcgtgttgatggtgttgtaacaaaaattgtacctgctaaaccagtttttgaatcagcttttaaaatgatggttaatgatccggttatctatagagcagttgaaaaagaatgtctacttggtaaaattgaatttgaaacaaaccgtatacggaaattcattgaagaacttaacaaattcaaggaagttcctgaacctaaactgttcaaggaaagattacaatatttgagtggtaaaattgaaggtggtagtaaagttattgcagaatgtgaaaatgaaatgttaaaactcaaagatcataaataaagaaaggacactttaattctaaatctaaacttattcgatcaattatttatttattttaattattttataaaaaaataccttgtatatttgtttcataatgaaactttaatgactggaaagaaaagaaaaaatatcaattattaggaaagtagtattttcaatgcatcagatgcagttaatctatcattgcattcataagacacaaaacttgtgaaaactttttcaagattttcattgaaattagatttttcattgaataatttaggtacaattacattcaatggtttagcaggtttagtaaagaaagtgttgttcattgattcaaatgaacttaaggtcttacaatctgaccaatcagatggaggagacccgaatgtggaaattatatttgataataaaactaaatcactatgcatggaatcatcatcaaatggtgattcaccattatcactaagtaataatgtcataattacaccaactgcccaaatatccactttattagtataatcacgtttagataatagtaattcaggtgctttgaaaataccagttgctatatcagtgaattttttatcagatgattcaagtccattattatcatttccctgatatgagataccaaaatcaataatgactggtacatctaagttagattctgaaaataaaatattattaggattaatatccctatgaataatattttgactatgtatccattccaatccttgtaatatacctataattattttgtttatatgagataattccattttatttactggaacacgatcaattgacccatcaggattaaattttgaacgtttcttgatattgatattgatcaatttatacaatgtcatatcataatatgggaataagagaccatactccatatctgtatttttcacatcaatcaaactgacaacattgattatctccctaccattgatccttttagcattctctaaatcttctagtattttgatttcattacgaatgctatgtggtggtttcaaatcgtctggatcaactatcttcaatgcgtatattctttcattggctttagatactttataaatatcagaaaaccgacctcccgatatctttccaactacttcccagccaaagtgtgacatatatcaatggaaatacttgtcgatgttgaagtaacccttgatgagcttttcatgtacccctattgcatgttaagagccgttaacattaagatttgaacttcattagcaccgtcgcatcgaccttttggtttagctcttataactgcactttctgttaatgggacatggttaatcatgatgacaatagtgaacatagttgcttatgggctttaagttggaggttataagtgtttaatgaaagaatgacagttggcattgatgtcagaaatgagttattgatgattctagatgctaatgatattgttagattgaaaaactacccatatagtgatgaaggcttggtaaatgatgaaattagggaaagagcttggcctatattacttggaatcaatccgttccttgattcatatctaaatgaactatacaaacagaatgtaatagattggatgcaattggatccaaatacatttcataaagatgtagatcaagttcaaaaagatgtcgatagatcattcaatacactgtacagtacgtcaagttgctatcatcataagggaaaatccgttgaagatttgaagaaaagattattcaaactaattatgttggtattgaaggcaataccacaaagcaattattatcaaggctatcatgatgttgcattgatggctttattacatttcagtgacgattgttcatctttcaaatttctatacatgttgacattgaaatatctaagagatcatatgatgtccggaatacatccaacaatagtacaattaaacttaatacccgatataatcaaacaaatagatttccaattttacctgattgttcaaagagttaacccaatatatgctttaagtagtatcatatcgttatttactcatgaaattgaaaattatcaagacgtatcaataatttgggattccatttttctaaatgatgatcctcaactaccaatatatctatatactgcacttctaatatactataaagaagatattattatggatttgacagaaatctgtgattccagtggtgaaataaattttgattttgatgttgatattgttcattcggtactatcaaagtttattaagaaaaatctgagtatcaactcaattgattctaaacatgaaatttacaaaataatacaactatcatttaatttaaggaaagtcagtgcccatgagtagtttgaaatctttcaaacatatttacaaaaactcttttcttaaatgtacatcgggctcattgacctgttttccagagtcttgctgatgagtatcacagatatgaaatgaaacaattacgaaagaaaaaacatggtgcattgattaaaagaaataaaaataatatgatatcattactcaaaatatcagctggggtaggaatactgggaattattctgcatgtcacgtttaaacaacccactaggtttggaattgagagtaactttgctaaagcatacattaacttatatcagtcaataagggagtacatttagtttattatgttattttgttttatttttctatttattaggatataagatgtgtatataatttaatgtaagtgtatttttcaaatgtttattaagtttttttaattattctatgtcaatatttgctaaatagtagcaacggtttcttcaaatttaacacttttccttctttgtgtatttggtgctatttgcaaatttttcactagagaaacaatggttttagaaactgtagattcagaatcagtagatgaatgtacttcatcaatggcattttcatcatcagattcttcattgatcaaattatgtgaaatattttccagcatttctctgatttgatcacgattatacttaatgattccttcaccaaatgatgcaccggatgaagtaaatgaagcagttctaattttagggaatatggtttacgtctaatttgttagatgtttgtttaacctttacaactggaaggaatgattttaggaacatcaatatcactattatcgtcagagataaatgcgatatcatcatcttcgacatcaacaggatttgagtaagtcttgatctggtaaaattaactcttctaaattagtaattttatcacaacttgatatttcaattatttgcttatcaactataccagatgcttctgtttgtatatatgggtttaacacttggatcatcaataacttcttctgataaaattttgattgactttgtttcagttgttcttaagctgaactcttcatacacagtgtgttgtattaccatcaaaatattcaacctttaaatttggatcagcagttttggattttttgatagatgaaaaaatcaaataaattgaaccgttatagttgttcaattggaaaatagtaatgtacttcaaaaattgaacatattccatctcaaaatgtttgaaacaaattagaaaatgactcccagactgttttcaaatcaattgattcattgttggttaattttctcataatgaatgattctaaaactgtaatattcatctgaatcaaaacattttaatgactcaaaaccatctttcaaattactatcataataaatgtgcaaaatacacattaatgtattataaactaaatcccagttgtttgattctaaccattttatcaacttttttccaacggtcaaaataaaatgtatccttttcagaaccatctacagcagtaaagttatgagatgcaggttttatttgaaggacgatgatataataagttgtgcttaaagtcaagattcttacattgtttatcacaccatcgtacctcgcatgtaaaacaatccaacccgttaacaaatctttcatgtttatcttgtgcagtttgtttctctctatcagatttattaccatcatctttcattttacccttatcgtatattttcaaaactgcaccacagtaactgcaacatttacccttttctaccaaattgattaaatcataattgggtaataaaatgtatggagcctccaaacaaacaataccaagacttaacttatctatcttaagtttgatctcatttgatcctgaatcgtaccttaaaagatgtgcagacttacttttgctgaatattttcttcaacaaagttgctaaagtttctttttgcaccctagtgggtataatatcttcgtccattgctcctactagcaaaaaaatgagcttcttactacagaaagatatactatacaaaaaattctagaaagagtaatatacagagtggcaaatcaaactgtaaaatgtgtcatcttaaaattgaagacgggtgttatcgctcgcgtgagggaagggggctcaactttacaattcatgatctccagtattgagctaagttgtggagacggtcgataacaacaggaagcactgcattgacacttgaatctataagattttggaaatgcaaaactgcttcctcatctgtcatatctaacatgaatttctccttcactttccataataattccattttctcagcttcactattttcgagactcgttcttaatgccggaattgatgtatttatcatcaactgaacaagattcaaaatcagggatgagttctttcttaatgtaatatatgtaataaaacagtattgacagaaagctttgtagtttatgtcatcggatccacccattccttcaatgatctgtataggtaatttcataagaggtggaaatggttttggatcttgtcctaaaatatagccaaaatcagcatggaaaaaatgaccatcctttgacaataaaagattctccaaatgtctatcaccaacacccaaaatatacgtaaccacacaataaccggcacatgatctgacataattatccatgactttaggggaaacgcctaagtgagcatctggatcaggattgaaagtttgtaaatataataaaatagagttattatacttggaaagaatatgtgatagagaactgtttggtataaattgtatgaatccttcaactttacccgtagctaaaattttatacggctttaatcttagatccatgttttcactttcaagaattttttccattaatgttatgatttgagtgacaaactgatcttgacgcaggtcatctcctattttatacataattggatacttctcaccttgtgttgttttaaaagtaattttcaatggattcaaactggatttaaaaacggcagattcatcaggaaaaacaccatttacaagaacagtaggatctaatggaatagctatcttggggaactctaccaaatattcatgtttagagtcatcaaatgatatattcctggaatcaaatttagtaccaaaaatacttctcttctgcttttctcttaatgaattcttcaaaatctccaatttcataggagtggtctcttttctgtgtaaaaccttaatagagtagcagaatctatgtaatttattaactaattcaatttgtcttcgaagctcaaaaagtttctccttaccgtgttcacttttgaacaatctgataagaaacatgttcattgtcatagtatagatattattatttttgtcggttgaccctttaaatcccatattgtttatcttatcagagctatcattattgcttgcagttctattactactatcatttgcattaatagttttctgaaaatctatctgggtttcattgcctgttgataccctattccttgaagcttcttcttcaaattcaactttcaaacaccaatagaagtagttagttaacgaactatcttggatacatctatcaatcatgaaatttatgaactcggatccaatatcagccacatccatcctactattcttcttgctatttttaaataataagatgtccataaaatctgtaatttcactatcaacaccagattcattttcataatcatcattaccaacaatatggtattcacttgaggacatagtatgagtagatgttgaaatatccttagatcgtatttgtaaatcaccttcttcttcatcaacatctggtctattttcagctctatatgaaacttggtttggattattaggcttcttttcaacataaagttcatttttaatattttgcactaattgaaccatgaaaatagacaattcagcattacttgctgaatgtaaacgctttatagccatatttctaactgtcgcatttctaaaattagaactcaaaagttctaaacaatcaactaattgtaattgttcaatgaacaacttaaatggtgaattgattgtttttgatgagttatcatgagttgaactagatattgcattagtaatagtttgtaaaatattttcgaattctttgacttcattaacgttattccaatcaacacatttaataaagtttatgatggaattactaattccaatattacctattatggcagtatttaagataaaccaacgatatctccaaacaacattacgttcctttgatgacattttttcaaaaaattgctttttcaaaatttcatttaatgattgcctcattcttagagttggcttcaaatctctatcaactggtgaaatatgttgcatacgttctaatttacggaatttttgttcgattggatcttccattaattcatccctgatttgatcgggatcaaaggggcatttagtgtttgagtataaatgagatatattatcttcaatggagccttcaaagttgagatatttgacttcattaaaacttggatcataattggaaactgaaacagttaagtcgtatttgggtattgcaataggaacatatttgatatcggaaaatacaacgggcacattataatctctgaattctatgatcatctctgtctcgggaatggttgtattaatgttaaataaaccattattttctgattcatctaattttgaaatagtcaatctattcaaccattcaggtcgttcactgtcatttgaaatcaaagtcaagatctcgtctactgattttatttcgttctttctatcttttgaatttttctgtttattttttccattatcaattgattctgtgttatcatcttgtaatttcacattaattcttccctttaatagagtgcaatttttatcaaacatttgtattcgaccggaattcaataaaattttttcatttgtctctatattaaagcaccaattagaaaatacaatatttgcatcgattggaagttttgagtattcaattggtagtgttatccaactatttagactatctttattttctttgtgtaacgatagtgatccagcaactgataggggaagagattgatactgatgaattcacattaatgttgttcgatataccaccttcaaaaacatagaagttaataatttcataatctccaaagctcaattgattattggcaccatcattaagatgatttattttacatctgcgaccgcttaatttaccagataatccaataattattggtgtagtcaattgtttcccaattccaggactctacatgaatttctgtgaaaatttcagtttcactaatagtatcttgtattctattttcaatcaaaagatcggtgtaatctgtacgtgttgattgtttgttactttgtgggtaaatcttattgtaaagttgtaaagttgatatacctcttaatgagtctattcggagattaactagttcatgaaagtccttagataatataaagtttacaacagtggagtgtttcccagacattgttattatatattgctcccaaatctgatatataaaagcaaatactcaatcacagccactataacaataaagcggtgtgatgataaaatgttaaaacattcggaacatgtaatcatttaccgtcttctctctctcgctattaaaatctttacgaataaatttagtggacgatattttgttggtcgtatatatagtttccagttcttcttatacttttgcatatcttctttgttttattaggtttacactcaacttacagctgatacaacggtgtaagtagtcattaacgactagtctccgtccctaccattccttttgtggctggaggtcgctacacactcggtagatgttggtaaattacaaagttcacttgttgattgtgttaatttcgaatctctaataaattcggtgaaagaacatatacagctattttactatatggagctaaaactgaacagtcaaagcatcagattttctaatacgtgcaactcattcatttttagcttaggtcccagtctgaatatattgttgatatctttatacaaaaacggtgttctcaaagtcgcttcatcaatattttcaaaaaaacttttatatagttttttgtttttgttgatagtgaaagttcttaccatatctgcatccctgtttccattgaattcatattcaacataattttcaatttgacccaccaaacggaaaaaacccaaaagtgtgctggtttttgcttcatcactttcttgtctctcaataatttcttcaggagtgggattttctctttggtcatatcttatagaaaacccagtttcagtatgtgtatgaagagcaagtataggtggttccctggattccactcatatatctactttgaataaattccttgatttcatcacgaggtaatgtattttctgtgccatcattcacaacatgctctcttctcataccaagagtatcaactcctttagccatgtatttgaacaaatattttacaacagctgctgaaccaaccagatctaagtttacatgacatctatactttttcagtcaaattggattatatgaaacaatgttttcatcaccttcacctcatggcggtataattctaccactagctgtctttctgaaataaggacactttggtcttggaaaacccccatttttacagttttttgggtctgaaccattactatcgatcaagtctgcatttatgcatcattcatgattcaaccagacctatcaaatgctcagtcttctggcatgcatcttttgataattttatctaccaaatcgtaaataactttatcaccttgatcgttgacatatttcaactccgggcaacgcaaaaccaaatgaataaactttactattttcctttttcacgaaagttgatgggaaaatatcattcttctcatatcctaaagattttaaggtttttgaaatttcagcatgccataatcttcctgcctgttttaatccatataaacctctgttgagtttataaaccaccctcttattttcatattttttgtgatttttagcatatccttgtggaggatagatatagatatcagtatctaggaaactgtttgggtaagcagttataaaatcaaattgtttaaaataccatttggaagatgcattctgtgctagtatagttcaagcaatttctgctctcattataggcgaataagtttcattgtaagttgaatcagactgcatatcacctctagcaactaaccttgccttatatgatccgtcacctttgatgttgaaaacccatcttgtggaaatggtcttctttaaaattggatcatttttatcaacatatataggctcgggatgccaggtcttgcttaccttcattttgaatagttttattacattcaagtgatctagttttagatctagtttgcctaacagatgttgtatctacaccaatggttgacttattttggactttgtctttcctttttgtttttgttgaagttttgtcgagacttttctttggggaaacagtagcaatctcttcttcaacaggttttggatttgaattttcagaatttgaaggaatactttgtaagcaacttctcaagatttttctcaattgtatttttctttttagtattctttttaccaacacccttcttaggttctactcaaaatggaatcatcatatacaatagcctttggtttctttgatttagttcgttgagctattgatgtgttttcattgattaaagtttcagtagtaggtgttgttgcttctggattcatttccaattgttttgaactaaataaatttgttgaactttctttttctattgaatctggttgagatggttcacatacggttaaatcatcacatttagcggatggaaattcggtttgatttgcacgcaaagttttataaactgcatttctccgttataacttttatataacaatataataataatacagttttatataatagttttgatcaatcaatccaaccttccttttgcaaaatttctctttcatttaaaatcgaactacgtgtaatcaatcttctctgttcgttatttttcaggaaaattttgctttagccaaagtaaaacagattgtgaacgagatactgtatacccaaaaattagatttgatgcatcctgtaatgtcatttcccgtaaacgtagcattgaaaacatcaagaaatttgtcatagtctaatgcatctgacataggtgtttctcactattggcaatattgtattcttcaaaaaaatttgctgtttaagtgtagctttcttgctttccttagaaagttccatttttgcagttgatctcatctcttctccgattgatgggtgcttttgaataaatgtgactataccatttaccactttatcgaaatcttcatcttctgacattgtggtacatatcaactttttattcgtactaaacgcttgaagttttgaataataatatttagcaacaaatttaggatttatctaactctattttcaaatatgcacgatatccacatggtgtagcccaagcatcaaatttaacttgtgtccattgatttaatatccctcgtttattcaaccatttcatgtttttcaacaataagaacggcatagattgtttaggacctgcagattcttcaagcatttgaattcccttataatttttgaactgaatatattcaacgtcaccgggtaacatagcatcattagtgttgaaatccaggattacttaatgaaccgattaaactaataacatctggcttaccacctagtgtagaagttattgtcaaacctaatgatttactatcaacaaaatcagtgacaattaacttttccttctcagcatgtagtcttaaccctcttccaaccatttgaataagtaattgttttgatttggttggtcttaaaagaaaaattgaatcaatgttagggatatcatgtaccttcggtgaaaacaccacaattaaacaatacgttaatttttcctgctttgaaatctttaacaatactatctctttccttcgttttagtttcaccactaacatattgagcgtttataccattggctctgaacaaggcagataaatcttgcatatgtttaatattaacacaaaataccaacaatgatttgaaattgttaggatattgttttaaaaatttcaaataagtctttaatgcaataatattaattttttcagtattaacatgtttggctaatgagtcaagtttgaaatcaccacccttaatttcaacatcacttagattaagtcctatctcaactttcaaccaatcaaaatcacataaatggttttcatcaatcaaggaagctatattcttttggaaaacaatcttctcaaacacttttcttaacggtattttatcggttcttcccagtgttgcagtgaatccaagtaagtaaggtgaataattagtcttatcttctctagaacaattcatcttattgaaaattttcatgtaactagcactcacggcatggtgacattcatcaacaataactgccttgaatttattcacatcatattcatccatcctactacattcattcctggacaaagtaggaacactcccaactataataaaaggtctatcatctttaaatattatcaggatttagtttattatgccccatatctaaaaaaattctatcatcatcaacaatattaaatctctgaatcgtagctatagtttgagttgctaattcacgtctatgaaccaatatcaaaacaccagttggcattatcattttcaaatcttttcaatttcattaattcaggtatacatgtagtgaaaacaacggttttaccaccaccagttgcaatagaaatggctaatttatttttatgaccttcagataactctgtgataatagaatctatgcattcttgttggtactgtcgtagttgaatgccatttgtaattattgcatcatctacagtagttaatttttcagtggcatactgtcgtatacgaggtgaaatgtgtatctgattcttaacaacatcaaaaaattgtcctttaaaccccctaaacttattcaaatgaaagtatatctgtctatacaacaataataacatatttatattcaacagatatgcatttatgtcacaataaccttcagaattattgatttgtaatcaaatttagtataataatgcatgcatcacggaagacatgaatttttttatttacttaatgacagcacggatctgtttctttttctttttgataaacattggtttctctgtaattcatcaaggaacaacatcaaaatgaaattcagtggatatatattgcttttcttgtcaatggtgctggcagtatttgcacaagaaagtgtaattactgaaaataaagcagaaacacaacaatcacaacatacaaataattgggcagttattatctcaacttcaagattttggtttaattacagacatatggcaaatgcattatcaatgtatagtcaagtgaaaagattaggtataccagattcacaaattattttaatgttaagtgatgatattgcatgtaatccaagaaatgcatttcaaggtgaagttttcaataatgcagatagacaaattgaattatatggagataatataaaagttgattatagaggatatgaagttacagttgaaaattttattagattattaacagatagatggccaaacgaacatccaaagagtaaaagattattaactgatgaaaattcaaatatcttcatttatcttacaggtcatggtggtgatgaatttttaaagtttcaagatgcagaagaaatttcaagtcatgatattgcagatgcatttgctcaaatgtatgaaaagaaaagatataatgaaattttctttatgattgatacttgtcaagcaaatacaatgtattcacaattttattcaccaaatataatctcttgtggttcaagtgaaattcatgaatcttcatattctcatcattcagatgttgaaattggtgttgcagttattgatagatttacttattatacattagaattccttgaaaatgttacaactacttcgaatttaacacttcaaaatttatttgattcttatacatttgataaaattcattcaaatgttggtgttaatacagatttatacaatagggatccgaaagatgttttacttactgatttctttgcaaatattcaacaaagtgttattgttgaaccaaatgaagattatctctatgtttatgatggtgatgaggaagattacccaaaatcagaaaacaaaataattaaaaacccaaataccaccactttacaacataaagaaagtgaaaacataagtaacgttattaagataagtttccaaaataccaaagacattgtttattcatacggtatcactgtagcaatgattattatggtgttagctggttattattgtttttaagtgtatacaaaattgtaatctatataatgaatctataaaataatttgattagtgttattgcttttgcttcttggtatatatttgattcatgatccaataactaatctgaatagtctaatgacatcagattttaagtttttgtaaaaatggaaatcatcaattgaatttaatccagattcctcctctgtacctaaattttgccaaccttcttcgttatcatcagtttcttgaattggtccactgttattttcccttaatagttcattttcaactaatttagcaatttctataaatttttccttgatattagtattgttatcattattattatcatttgggctattaatttcacctgatgtgttgattctattgaatattgcacgatgtccaaaatcaaaattagattgtttactttgatttctattatatggagtatctgatgctgatgcgattccaattgcttcttggcgcaatttcggcacaattaattgaagttggagtatgatagtaattttgttgatgaaaactattgttgttatttttattattgctaatatcatcgttcatagtatttgtacttctataatttgaggaattttgtgttggatgtgcatttgatgttattgaatggttaaattcgaaaaccggtttaggaaatatgaaatttttaaacattgaataggataatgataaattaatactatattttagaatcattaattcccataaatttgatgctaatgaaattaatttattaacacttgaaagttttttatgccaatttaacttcaatgaattgatggtttgatcaattaaataaattttcaaattaatatcaattataggactattctcatattgtgacatccctgatttgaaattcgttgctaaaatttgcattaataatattagttcatcaattggtatataattttttaaaatccagttgaattttaacatatctttcttagaaagtaataaaaatgtatctaaataatgaattaatgaaggtaataaattattttgtaaatccgtataattatattcatgattttttaatgataagttcaaatttgagttatttctataatcatcatcaacaatataaggatttaatattattttcttttgtaacataattaacattttatcacttaaaatgtttaagaaattcatgaaaaatcgaaagcaatcgggtaatgttccataattattatgaccttgtaagtttggatttgagttcaaaaactggttaaaatgatcagtatcattatttggactggtgctaccaggttcgttataatcactattattattatcattattggtactattattattatttccatatggttgttgtaaattattataagtaccatgaattaacattaccatttgtacttccggttgcatttgaatgaatatcgaagtgattcattatcatcattactcatatcatttctataaatctgataaaataaactactcatttttttcatagttgaagaacaattgatgaatagattattgatattatttttcattttattaatatcttcaaatttcaattgaacattaagtccattggtgagacaatttaaatcatcgactattagagtaaatctaaacatacaattcaaatacataattgagaatctagtgcttatatttgaatttggatcctgaatttttcaaaatcatttatattgggtaatttatctgatgattcaattaataaagttgtatcaaaatcacttgttttaatcaaaggtgtaagatttaagaagaatgagactagattatctaataagaatatttgccaccaaacaatccttctagctctaactaattcaacatcttttaatgcatgataaagaacaggatctctatttaattgataaaattgacaaattcttaaaattttggatatattgattaatgatttaccagcttttaaattagttaatgattgaactaatacatttatttgtaaaactgcaagtgacataactcttggattatttaaacctttatgattcattttcttataagtattataatatttattaacttcatttttatatgataaaatattattaaaattatcatattttttagataaaaattcataaactgaacttgaaactgaggtataataaactgcaaataataaaattaaaaattcatttatatttgaaggatttaactgtagtatttgttttattataccaataaaggaaatctgatatttttctaggtaatttttcatcatctctaccattaaaataaacagtatattgatataattttttaatattatcagtaaggaataaaccacaataccaaaattcattatatttttctaaaaaattttgcatatctaaaattggtaaaagggaatgaatatttttttgaaaattttctaataattcatcagatctttgctttgttggtaaattattcagaattggtataaattgtgaagcaaattgtttactataatgagaataaatttgaacttcaggatttattattgaatcatttaggttcatcatctgtattgattgaagggttacgattaatattataagttgaatttgaattggaattttgttgatctatgtttaaatttgttgttgaattagtattaccgttatcaataattgtatcatcacggggtatataaacaaaatcattgggatctaaattaaattctatactttcatttccctttacattaatattttgattataatttaaattattatcattattgtattgagagatgaaattttcatcagtaaatttgatcgtttgatggatagccattgccaatagttttttgaacattctcatcaaattgatttgtagtagattgattattttcgtttttttcttcttcattttctgttccactgtcatcattttcattttcattttcatcaaattctccatctatatcttcaccggtacttaatttaccagatttattaacattattaataacattttcgttacttaatgtaacacctttcttttttaaatttttctttttatcattatcaaaatatttacaagcaagtaaaatttcatctttctcctttggatttttttcagataattttaaacaattatgacaagttggtaattctcttgaacatttaattttcctttgatgacaaggtatacaactataaattttcctttgacgttttttttgtactttaaaaattttaccatcagctaaaataagagaattagttaggatgaacatttggtaaagatttattaatattagatgatatggtagaagatgatgatgtgggtatatgttcaggttgcatttttaatgaagatgatttaaaattaatgttaattctgaatcttaaccttgatctttgtatatatgaatgagccttatttataatatcttaagaaagagggggtgcaaaaaaaaaatctgaaaaatcaatcaaattatctagtaaatttacctttccagcggaatatagttagtaagagagtgataataaatgtaaatactatatctatactgtaactattaggtataccatcataataaatgataataaataattataaatgataataaagatataataaatcaaccaaccattactaaagaatattagaagtatttcacaccctagtaacactgaaaaacttaaactggagagccctcttaataaaataaataaaataaaataaaattagaatgaagtcgatgcgtctattgtctttaatataatgattacataatcatcaacatttttataatttttcaattcccctacatttcttatcagcttatcggaatatacaactattaattttatatcgaccgcagcggttttaacattgacatattttcaatttgatatatttttcaattttatatatttttatttaaataacttgcttgaaacttacctttctttctttttttttgatagtacattattgactaatcctctttttcctaatctccactcgtttaaacaatgaaaaaaaacacacctccaatgggtagatacactttaagtatcttctcactattatcaattttatcagttttagcttatttatcctataattgtgcaattaatacatcttctttatcatctttcttatctacaaccactacagtagatattgaattctgataaatatccaaaatgtcctgaagttgaaagattcactcctgaatcttatcaaaatcaaacttttaaggatactttggataaaattattaatgatgaatcatttagaaatttatcagttacaagaatgcaaaaggcagttcaaattgatacttcaagttatgatgatttcccacttgatgttggttcaaatttagaagtatttgaaaattttaatattttccataattatttacaaaatgaattccctctcttcatgaaaacttaaaattacataaagttaatcattttggtttggtttatatttgggaaggttcagatccttcacttcaacctttattattaatggcatcatcaagatgttgtcccaattaatgaagattcattagatcaatgggaatttcccaccatttgaaggtcattatgatggtaaatatttatatggtagaggtacaggtgattgtaaaaatttacttattggacattttgaagcagttgaagaacttattaaattaaattttaaaccaacaagatcaatcatcttttcttatggttttgatgaagaaattataggtttaagaaatcaaaatggtaaatttattgaagatattttcggtaaaaaatctttatacgcagttatggatgaaggtggtgtttcattaatggacattggtgaaactaaaatggcagttgttggtactggtgaaaaaggttatttagatttatcaatttcaattcaaaaaaaggtggtcattcatcagttcctcaagatcatacagcaattggtataattggtgatttaattgttcaaattgaaaataataaattcccaacttatttcacagactataatccaactttccatcaatatgtttgtttagctgaaaattctattgatattgatcaatcattgaaaaaagatatacttaaatcacaatttgatgaaacttcaaatttaaatgttagaaattttattaataaagatagattaacaagttattcaattaagacaactcaagcattagatgttattcaaggtggtgttaaagttaatgcattaccggaatttgttgaattaaaaattaattcaagagttgcattagaggaaaatattacaattgcatttaaaaaatttttaaatgatacaaaaattattgcaaataaatttgatttaggtttaaatgttcaattcccatataatgaagaaattattacattattaccatcaactgaaaatggtgttttaactattaaaccgattaaaactttagaaccatcaccaataactccaattaatgattcaaaatgggaaatttttgcaggtacaattcgtcatatttatgaagaattagcatatccttatcattatgataataatgataatgaaaaaaatcaatctaaaattgttgttacaccaggtttaggtactggtaataccgataccaaactttattggaatttaactgatcatatttatagatatagaccaggtgttttaccaagtgttacagcaaattctcatggtattaatgaatatattgaatttgattcacatttacaaattattgcatttattttccaatatatccaaagtgttgatcaagccaatgattgattcattgattgattgattgatcaaactaaatttatacttttttcattgttatctttccccctcttgtccgtcgtaccatataaatatatttgaatcatgaaaattgtcccaaataaaaatgtaacaactgtaataccgaatttccccctatttgaatcaattgcctcaaatagaggtaaatcatttcttaataagaactctgataatgaaaaaaacgaaccaattaaatctaaacttatctgtaattttgatattccatacattgattttcttttataattatgtaaaacttgtgggatatatttaatcaaactaataataattttaaaataagctaaatttaatgcaaaatttaagaatgcaaatacttcgttatcaaatttccaattataaattgcaaaaatgataaataatataacaactaatttacttaatttatgaattttaaatcttttacgttcatttttaaatccccatatggaattcccataaattatttgtgataataaaacaagtaataaaattaatccatgatatgcataaaataaatcagcttttgacaatattggcattctaccatcaaaatgtttcatatattggaatcttacagtttcattaaacatttgtaatgaaatacttgtagaataagcaatataacctagtatattaagtaccatataatcagttgaaattgaatctgatgtctttaatctataatttagtaataaagttggataaaaggctagcccccaagtaattgcataaccccaaccacataattgaccaagatctaccatattctgttgtctactatcaagaacatcaacatcagataaatcataaacttatatcaatcattattaaagaggggctgtaagttaaacaagggtcctccattcatgatctcggaattttcaaaacaggaatcttttgtcggaattttagagcgttttttccacaacatgttctgttaacagtgggggttttccatgaagagagagtgtgtttgatcttttgttatcttcacttccttctttagagaatatctccttaaatagatgccgatggagtataacaagatttgtgtgccgttattggaacgttcacagataaggaataagagtaattcagtttcttggtctcgtcaaggtcatattgcttacactttagatcctgaaaatgatgataattttataaattctgaaggtaatttaagattaacttatttagagtgtatcgatggtaagaattggcaattggctccaccaacttttttcaatatcgctttattattacaatcctcaagaattactaataatcgtaataattcaaataccaactcgaataccaattcaaatactaattcaaatgctaatttatcttcactaccattcccaaagaggaaactaccaccaacttcatttgtatccttcagtaatacaggttgggatttatttacagctgatgatgaaggtaatgttaccattttagtgacaggtattaaaagtgttaaaaataataaaccaaaagattatctatcagcaactacaggtattaatgaaaatataatgcaagttcaatactctcgtacctctttcaatacatgtgaagttttctttactgaacataattataatatcacaaataatataataaccccaatacccaaacataataaaattttagaaactaaatggctcaatttagataaatcagttatttcaaatataccagctgttagaattcaacaagatgcagaaaatcaagttttaaatggttgtgcatctaaaatgggtgcagcatcagatgatgcaaatggattttattatagatataatgctcaacaatataaagcttatggtgcatcacacccattagcaactaagcaagcttgtatttcaattagacaaaatggtcaagtttgtctatattatcaagcagaacatggaattgaatatgaaaaagtttgtgtcgatttaaataaaaatgaaactgttttaattgatgatgttattacaaatgcaagtattggatttttaaaaaatggtaaaattataataattgcttattatagattatctaaggttagtaaaatttttgaaatcgaaattaaatggaattatttaagtatagctgctaaaatgttagctgaaaacccaaattatcgtgctccttccgatactaaagttttacctgaaatattaattactaaattgcatcaattggatatgaataatatagttcaaggttttgaatttaatgatgttaccttaatatctcctaattttgaacaagattctcatatggaaattttatttagttttgaaaatagaaggaaaaaggtatctgatccaattcaaacaattgttttaaggtatcaaatagttgttgttgatcatcaaaagaaaattcatcaaagttttaaagatattgcagcaaagaatggtgttgatgttactcaattctctcattcttcattttcatgtaattatattcaaatgttaactattaatgatttaattctgaaaattgaaccaattcatttagatcaatttattgcatttgtattatcaagtggtgttattagaatttttaaaagaaaagatatgtctgaagaagttaataaatttagtaaagaatatcaagaacagcaacagcagaaaaatgctaattctgataaatccagctcattaacaaatttaccaaaccatatatcattaatgttagatgctggttatgaatttacaaaattaaaggaacaacctaaatttgtttgtttatcaccaaatatttgttcatatgttgtgttaccaattggtggtaattcattacaatcatattgtcttacaacttcgaatgttgatgaagattatttaaatggtaagaaaaagggtttgttattggctaaagcggctgcaatttcattaagacatacaactgcatgttattttggttattttactgatgatatagttgcaaccattagaaatgatttaatgatattgagtaaaaaaattaatgaaaattattcttatagattaatggtatcaatacttcaagaatctcataggtcaattaatttgaatattgatataccaagtgaacaatctgataaaatggtacaaaatcagccattacagagattattaacattacaattatcattaggtacttctgataattggaaaaaaacacgtagtggtaagattgctttggttttggttaatttgagatatgttgcatcttcagttatgtatacaattcatacaatttattcaaatatgcaaagatttgttaggaaaggattccctgcaactgatactctcctgaatgctaaaatgagagaggagtgtatcttatcagtcatgggagtgataagatggtgtttagattatattgtattattatcacaagaattgatggaattaaatagtgcattcaaatctaatgatactgagacaattgaaaaattagttaaaaattcaattgttattccattaattttaggtaaaaattccaagatcattcttagtattttcaattgccaatattagaagattattttcatttgttcaaaaattcgttgaaaaaaatgatccaaatttaactgctaaaatcacatcagataatccattaggtgcattcgatatggttgaagaagattatttgaaaaatgattcatcagttatacaaagaaaatttagtggcaatggaagatcaggatctggttctaattctaaaactggtaaagcaattgtaattgcaccaacatttgaagcttattatagattaggatcattaattagaagattacccgtttcattagttgcatttgaaaaattcttaacagaggcagatacacctttaagaaatatgagacttgatgcaccaatgtcattggctgttgaacaacaaattgtctgtcaaggatatgtttctaaaaattttactgatgcaatgaggaaaatcagtgaagttttcaataaatcagttttgagttattcgaatacaaaagtgtctgatttatatttttataatacttcatggttaggattggatgacattgttgaagaggaagatgatggagatgatgaagattatgaaggtgatgagaataattttgaatatgatatgtctgttgttgatgatgacaattttaataatcatgaaataaatactgcagtggaaatcaaaaacgaaaatgatatagttgatgaagatattgatatggaattcacacgataccgaaagcgaaagtacaaaagtagataaatcaccatctgctgagaagaagagtaaacgtcattcagaatcaatattccttgaaaaaactgatatcaaacgtagtcgtagggtatttaagaaattgttaaagaaaaacattaaagatggaggaattattgataatttacgtaaagaatggctgacacctgaggaagcaatgatgggacattcgaatgcaggttgatgaagcgggtaatccaagagatacatcatcattaagaaaatgtattacgttgtggtgcaatatctgtcatccatgatgaggtaatgtttattccaaacagtatggcatttgttgctaatcctgttttccaacattaccaaagaatctgtatctgtgggggatcatgggctaactatataagctatagtttacagtatataattgtacatataataagtgtaataaaatgtattttacctaataaataatgattccttaatgcccagacataaattaagcatctcaacgaaaaatatactttagtgaacatcgaagccagaatttttattaatgtaactccacctaaatcttcttcttggaatcattaggttccattcactgatacacatctggtaataatgttccacaaacacaactctgataccccacaaactgcatctacacagaccccaggatctcctacaatgcttcatcgttatggatcaacagaaacactctctgttctttctcgaagtattacagcaacttccataaattctacatcaacaattaatacaacatttgaaggtcattggatgccaaattcatttgttgtaagtcgtaaacgttataaagtatcacttcatttaaaaccttctgaaattgaacttttaagaaaatcatgggctattgttacatcaacagaatctcgtgcatctgattcaattgcacttgaaccactttcaagaacttcttcaatgggtcttaaattatcatcaactgtcactaattcatctactggtagtagtgcagttaacaataatagtaacaataataataataataattctggcaatatcaaaaatgataataatataataaatactgcaccaattccaaaggctaatcaaggattcaacacagcatcatttgcatcattccttttctgtattcaattttacaataatttaattggtatggatcctgaaattgaaacattaattccaagtatcaaacatcaagcatcagcatttgcaggtgttatatctgttgcaattggatcattagaagatttatcaaaaatgaaggaatcattattaaatttaggtcatttacatgcaagaattttaggtattgattcaccatattttaaaacaatgggtgaagcattaattaaaacatttcaagattggtttggtaatagtcctgaatcattcccattagaacttgaagaagcttggattaaattatattgtttcttagcaaattcaattcttcaaggcggtattgatccggttattgaatataatatacatcctaataaacatcaaacacaaacgcatgatgaacaaattgataaaattgatgaaaatgatgatgaaaatgataatgaaaatgaaattgataatgcagttgtaaatgacagtgcatcatttagtaaacaattatcggatttaacaagtaattttacagctgcatcatcaaatattgataataagaaagcatcaatttccaaaacttcaacaaatcaaactggatacactaaatatgatccatctgttaattcaagtaattccttcaacagtaaaccttcatacattcctcaagttgcacataaaaatattaatagattaaagaaatcaagaaatactaaagaagattgtacaattatgtgattgataaagaaaagctaaaacgttagaatgttttattattttcaattatatagacctatgtataataacaatgtagaatttcaagtaattcaattgaatattcattatttaagtaattcaaactaacggcaatttgaatatctttcattaattcgaaacattttgatacattactccataactttgttaaaatttccttctttgcaaaattgtgtaatgatgaatctctatttactaaaagaaaggacatcaaccaaacatttttaaaatgtaacatgatatttgaattcaacaaaattccatcattcatactacatcttataaaattaccatcatcattagttgattttaggaaagcctcaaattctaatgaaaaatcccctatacttggattggaaaccatattaaatgttgataaatcaggtattatttgtacttcctttaatataactttattaaaatgtttataattattcaaattttgtaaaaaattagtaaaaccgacattaatagaattaggttctcgtaaaaatgggaaattagaattataattaattgtaaaatcatttttattattaaataatggtatttcgattaattgatttcgatattttaatattggtatttgatccgttgaatttgggaattcacgtattgattctattgctatacgatcaattgatgcagaatctattagtatacccttataattagcaattgtttcaatggtattcacgagttgattatatacaggatctgataaatgtgccagattgttaagatatgattcatatttactctggttaatgcttgatgatgtctttattcgtaaacttctaatggaagatgttgaatcattatagctataatttcctgtttcaagttcattatctgagtcagccgatcttttagacatttgttgtatcttgattttattattattctataaataggtatatatttgcaaaagccaatagaagaaggttatctacaaaacagttttgaattttcagattggaaaagttaaagaatagatctaaaaaaaatatcgtgttctgtttgaaaaattattactttactcttcttcttcttcttcttcataatcgtcttcaatgtataagatttgtacaagataacgatataaatgttgaagatttgatcgtttaagtgggggtttcatatatctacgaagatcagcaacggataattgaaattccatattagtccaagtttgtgaacgttcaccaacttctttaaacaaagctaaagtccaaacctctaattgattataattagctaataattcattgtaatcatcttctttggaacttaattgcttcttcaagtcttttaactcagattgataaacttcacattgtaatttttgaatgttatcaacataatttaaaattctatttgaatgctcttcatttaaaaggttaattttttgatttttgaattcttgttcaatcctaccactatttacattagcatttacattggcagatgacaattgctcatacataatttgtgcagcctcttgacttcgttgtagttcttcctctttaagtttaagttgatttaataattgttttattgtattttctggaacatatgaagatctttgtggtatttgtaatttttcaatatctaattgtaatggtatattggaagatgaagcattggatctgttcaacgacattgaatctttctcatcatctgcatcgttagttgtattattctccattggtactgtattcctatttctaattctgctactcttttgagaacttttgttactgttagttttactattattatcattatcattactattacttttactgtaaacgctactactattatcactttcttctttagcaaataaaggcctagttttacttctaaattcaatatcattaattgaattattattaggtactttatattgtttaaatttttgatcttcaatttctaaattttgcattaagttttgcatagtattagagatatcatgaccaaatttacccttacttggagtagactgtgctggaaacccgttcattttgctgctctaaagaacataaataagcaattttgagatttttactaaattttagttacttacggggatattattttcactaattcccattcaatttgggttttcttctttaaataaaattactttctatttataagttatttaaacgttaaaaaaatagttttccacagttaacctaatgtcaacttaagcaccactaataatattacctattgaaatgtccaatactaccaaataaacactttaaataccattcatcacaacaaatacagtgtcataccaaaataagggcaataatacatcaattatttcccaaataggcagtaattaaaattaaattttttcgttacgcgtcataagtgtttagtatattacataatcaacatgtctttctcagagggactgttttcaagaaaaagcgtgtttggcgttttaattgttgactttgatagtacaatattatctatcattttttatcattttttatcttttatattggctttggtttaatttgctttcacatagcacttcatctaggtcagcaccacaccgtatatgctgtccaacagaacttcatctttgctccagtcagcacctatatcctctttaccactagaatctcctatcactcaagactctgcttccatgaattctctaaatgatgttttcgataataaaaatattgatacttattcatcagctcaaactagtacagcttcacctcaaagattaaacaacactataactcataataataatataaaggaacctaaattttcatcaaattcattttactctggtcctgcaattaattctcatactactaaaaatcatgctaatagatttaggaaatctttagtcatctctccctcatttaattcaattacaactaaagattcagaaaatggtgaagagaaaacaagtgatttaaatatcgatgaattttcttttcaaaatactacaactgaagaaccaactataaatattggtatggttataagtccaagtattagagctttaagtgatattttaacaaataaagttaattcaaattctagctctactttaccacttaaattacctcactcattaacaaatactacaattacagaagaattaacagaatttgaagattataatgactttaatgatgatgaaagttatgataatgcttatcctcatgataataaatcaactcaaacatatcaaaacattgatacaaaaactcaaaatgataccaacaaaccaatcattcattcacttattgatgatatttattcaccaaacccaactctcaatgctaaaacttttaacaatccaaatgatacccttaatattaatacaaataaagatttaatagatttaaatagtccagttgtcgaaaatagaaattttacaccagctaaaaattcaattaaatcaaatggaattaattacagtgatatttatgaatcttattccccattacatgataaaacatcatcaactattaatgatgacacccaaaataatacaaaaaataaaacaataaataattcaaacaaaagactttctaatagattatcaatgatgagtgataattttaattttaatgattttaattcacctgcaatgggttataatgaacctattcaaagtttcaatcttataaacccttcaatcagtaaatcattatctaaattatctattgccacagattctgtacatgaaattggttatgatgatacaaactatattgaatatgatcatgatgatcaagaagaatcagataatgaaaattttagtttcttaccaagtagaaatggtaccgttaatgataaggataataataataacattaacaaaaacaataataaccaatctgctcaacctctgtcaactagatctgtttcaagctcaacttttattcaaaaacatcaatcaagagactcaattagaatgatagatgatgaaaatgatgctaatactccatttaccaactccactccaacttttagtaatataaatcaatttgaattttctaataacaacaccactccaaatttaaaaactgtcccagatttaacacataaagaaactgtattatctaacagccctcatagaagtttgtacgattctccagttttaaataaatctccaataagaaacacttcaccaacttttgaaaaaatcaaaaattctccaacacaacaagtaaagaaaactttcatcaatttatctcctaaatctaaaaatcaaagtcaattcactcaacctcaatcttcatccactcaatttgattttaaacctgctcctaaaccaaagttaactttcaagagtttattctcaaaaaaatccgacagtaacaattcaaacaaaaaagataggaaatctccattactaccaaataatgataaattctcttcacgtccaaaatcatttaacttcaccacctcagaaaataagaagaagaatgttacacaaaaggaagaaagaaaagagaaaatctaagtctttactgtctggttggaagagaaaaagttttggattttctaacaataacaacaaacctagtccctcaactgtttcaaatgatcaattaaatactagtacaccaaaatctccagcaactaaacataacaagtcttcaagtgtttctagtttaccattattaaatcaaaccaataccaaattaaatccaccaacatcacagttcattgaaaaatctcataaacattcaaactcatcacctgatttattcaacaaacaattaccaaccttaccaccacctgaaactaaacaccaaatcaaatgataatgcattactgatggaaaaatttggttttgataatcaatcgccaaaatcaaatcaaagtccagtatttacacaagaacccgtacttactcaaaatgttaatccttcatggaatcaaaatccaactattcgtaaatctgaaagtaaacaaactattgaaacttctcattcaccaattgaacttcctgaaccacaatctgcaaaatttgctcaaaccactccaatcattaacaaccaatatgagaatagtgattatgttgctccacccgttattgaaaatatccaaccaaatgccaatgatgatacaaatggctcggttattattaatagttctagtacatatgatacaagtggagaagaaccattgcatattgataccacccattttgaaaatgaagttgaagatcaaaatgaaatggaatacgaaaattttaatgatttccagaatagattcgaaccaccacatgcattgggaattcaaaatattccatttgaaagaccaccatcaatttctacattccgtaattcagttactttctaacgatgatgatagatatattttgaaaacaccaagacaagcaactagtccatcagtatcagttgttgcatcatttactgcaagtccaaataaatatcatattggtgatgatatgtttcctaaaaagtttagtattgatgaaattgaatcaattgtaagtttggaaagatcaaggtcaattaaatcaattagatcagtttctaataaaattaataataattcaaattcaattcttagaatggttcaaaaccaaaacgaggaatttgatgagatggttttacctgatggtatggtcgttgttagaagtccaatgtttgatcaagcctcaatattaagtaagaataataatggtgtaagtaggaaatctagtattttaaaacattcagctaaaccatcgattacttcgaacattgttcattctccaatgaagaaagttgaatctaataatactgttcaaaatgataaaagaatttcaatgatgacaatcgaggatgaccttaatgaatttattgatatgattaattttgatgatgataatgatgatttaaattcaagtttccatattgatacagcaatggaagttaaattaagtccattgcgtaatattaaaagagaatcaagtgttcctgatttcttgggtattaatacaagttatggttcaatgaattttgatgattttgacttaactaatttacaagcttcaaatgcaagtatttttaattcaccatatcaacctccaaaactttctaattcaccatttaaagaaaatgaaagcattgaaaatttaattgaaaaggaggaaaacttgcaaaatgatatcaattatagtactcaaagtttaccaatcattgatagtgcatctaatttaaattataatatcactagtgatttacaaaaaggtttaagtggcccatcatttaattcattattgaaaccagaaacaaaatcagctataattggttctctttcaaagcaaaatcctattcattcaattgaaccttcagattctgaaaactccttatcttatattgcacaatttaattctgttaatagtcaactaagagatgatactggttatgaaaacaacgaattactagatgatgattatactccatatagtgaatatgctaattattacaatagcccacaagcatcacctgttcaaagtaataataaatattcattaaacaatcccattcaatgattacacccaatcatatgatgatgttgatgaaattgatgaacaagatattggttatgactatggtaattatgatcaattccaagcggatatgcaaaataacgatagttatcaatgagaataatgcatataataatgataaagctaataagagaaaatcattgaatttcttgaataaatcaattggtaacactcatacaaaatttggtaataataattcaacagcttcacttcctacgtatagtacaattaaggcagatgagaaacctaaaaggttaacctaaaaagaaaaatagaacatcgatttcatttggtagtatgtttgaaaatattataccacaacatattgagaaaccaagtgttaaattttcatcaagaattttattatatgatacttataatgaggatgattatgatcgtaaaccagattctgcaacatgtaataatctgacacctcaaactgcaatggaaatcaagaatgaattaaatcaattgaaggttgagatgccagttcatgaagattccagacgctatacacagttttattaaatatttttaccctttcctttttaatatttactttctttacacttatataaatttaattcaatccatttacgttctttaaaagcactgttatcatatagtgtatgtaccatagtaacatgaagtaaaagtgtttctacacctttctgcattacctaatcagataaccaaaatttcccataaaatcctcggattaatcaatctaccttcaaatcgcagacagtcaacagaacaacatgttacatcgtatacataaatacaggttttttctttgattgttagttgataattcattctatatatctgcaaatctaccagtgtacaaggaaaaacatcaatgtctctatttgaagtgcagaagaatgcatttatagccgatttaaagaaatttcgtgcttcacaccgtcatttaattgttgatgatactacatatccaataattgaaaaattatttaatgatgatgttttaaattatgtttatacttgtaaaaaaatagatggtgaaagatcaaagaatagagattctgcattatatttacttgatccaactagaaacttttcaattaattgtctagcagctgattttagtaatggtcaaagatataaagatacagttgttatgtttatgccgggaccgtatgaacttttttggaaagatttaataactaataagaatttttcaaattcattattaatgcaaaaaacacctcatattgttgattatttaagttttgtcccattagaaccaagagtttttgttacaggtaatttccattcaattccagtttattacaattcaatgaaacatggtaaaaattattatcaatatcaaattgatacagctctaaactcaatgatgggactttgtacgttaactaatgaatatccaattgttcgatattacaactctaaagtttctaaagaactagcacacagatttcaagaaaaacttgataaatattatagagaacatcccgatattataccaataaatagtaaaacagtttttttgataacagatcgtactatggatatgtttggtcctgtttgccattaccaatactacagatcacaaatttttgatttactagatgatattgaaatcgagagggatgtagatccaagtgctaaatattcttatattgcacaaacaggtgaaggtacagttaaaaaaactttatttttcaatgaaacagatccaatttatatggaattaaaaggatctaacaattgataaggcaactgaacatattaagaatctttacaaagagttaaagattgaagatgaaaaatttacaggtaagaatttagagacagctaatggattaagacatgcattggttaataaagatatacatgctgaaagaaaggctttgattactggtcattataatttatgtgctaaaatgtgggatattttagagaaagaacatttaggtgatattatgacatttgaaaatctgtgtgctgctggtctgggtccagttgaaaaattaaaagttccagttactgatgggttagtccaattattgaacaattcacagattaatgtctataataagataagaatgttagttgcatattcaatttacagaggtggaatcatgaaggctgatttggaaaaattattgcaattctcaatgcctgaaaaggctaataatgtcatgaaactttttcaaaacctccaatccattggatttacagtgataaaggaaaaattaggtgtcccagtaactaaggataaaacatattttggagttgaagatacggaagttcaaatgaaaatctatacaccatcatatagtaatatcatttccaaattggtttataacaaattatctgaattttacacaactaaaacacttgatacaaaaggttatgcagatgaagacgatgaaagtttgaaaactttcccatttgttaaagcgggtccaactccaatggaaatggaaggtatgaatactgtaagaaatcagcctaaatggaaaagtagtaaaaataacaatgatgcatcaagacagaaattgatacttttctgtgctggaggactaacaccatcggaactgagttctatttcgtctttggaaaatgaacttaatagaaatattattattggcacagatgaaatatatacagtttgggatatgcttggtgatataacgttaatacaggatgatgaatttgatttcccattaaaacagaagatggaaaagaaaccaattccacaattcttatatgatgattctactgatcctgcaataatacagaaacaattacaagagcaacaacagagacaacaacagcagaaactaaatgcaaaagctactgaatctcagagtttggcaaatgaatctacatctaaacatcatcacaaactcggatttagtcttcatggacgaaagaagagtgaatcaaactccggtgaaggtgaagaaaagaaaaagaaaagtatgatgaaaaagtttaagaacttgaatttttgaactactgatgtatttataactgtataattaataaactttgattgttttctaagttattttctaaaattaaaaattaaagaacacttacacttatcaatttatacatacacttactaaggccgataatagcagagaatagcataatacactaaatccgcggaaggtttttgcggaaaaatgcattattcaacttcttctatataatggtgtttcactgatttcatgtgtttttggatggaataacacttgaagtttatctaatacagggtaagtatgtttggttttggtaagaagaaggctgaagttgcaaagaaacctcaaaaagatcttattaaagttgatgttccttttgaaaaaccagttgctggtgttgcaccaccagatgagaagcctctaacagatgaacaaaacgaaaaatatcttacagttttaaaacatttccaagatccagaattaaaaatttcaataaaggaacacagtagtaatgaaaaagaacctcttattgatgatgaaaaagcttgggttacaagagaatgtattttaagatatttacgtgcaactaaatgggattgtcaaagatgcaatagatagaattgaaggaactatcgcctggagaagagaatttggcatcaaccatcaagttgattcccagaataaggtttcagctgaagtagtttcaccagaaggtactactggtaaacaagttgttttaggttttgataacgatgcaagaccttgtctatatttaaaaccaggaagacaaaatacaaaaacttcacacagacaagttcaacatttagtttactatcttgaaagaactattgatttaatgccttctggtcaagattcattggctttattgattgatttcaagcaacatccagagattagtgctgatgttgaaacatcaaaaattccacctttatctgttggtagggaagttttacatatcttacaaacacattatcctgaaagattgggtaaagctttattaactaatattccatttttaggtagagcgtttttaaaattgatttatccatttattgatcctttaactagagaaaaattagtttttgatgctgatttcattaactatgttcatgaagaacaattggataaagatttcgaaggtagggtagactttgagtaccaacataaagtttatttcccaactttagttgagatgtgtgataagagaaaagcaaactatatggaaagatttaacaaatttggtgccgttgttgggttaagtgaatttgatttaagatcatcatctgaaactctgtcaattccagttggtaaacatccttacaatgctaatactccagagacagagttagcaaaagctactgaaaaattatccttatgatattgttttctgtttttaaacactattccaaacaaggtaaaaacacacgtagagtttacctattgtacgatatagaaatttctaattaatttaatgtttttaataacacataatatgacaaacgccacttttatctggcactacgatctgatcctctccctctttcatttcctctgtatcttcctctgtaaccacctctttctctataagagtaagcattatcctcaaatcttccacctctataataattatcagttctacgatactcagaagagtttctattgtatcctccacgaccacggtcaccaccctggtttcgataaccacctcttccagctctacgattaccgccacgataaccaccacgataactagaataagatctaggaccagatgggattgctggtttatcactcctccttggagatccagatcttgatcttgagtaactttcatctcttcttcttggagatctactacgagtttcaactctacctcttttatttgtcttcgagtttccagttctttcagaagatgaatacgagcctgatctagacctggaatatgaacgtgatcttgatcttgaaacagatcttccacgactagaggcactttcatcactggaatcaccagcaatggtttcaacatcagttggcagggcttccaaagcttttctcatgttatctgttaatttacctagtccgatagcggtaaaatagttaatagagaatctaagatgttcggcattggttttagggaaaataccaacaagatattcttgaatatatggttcattgacacgttcaagaaaatgattaattccaatttcttcaagtattttttggaatacaaatttaagaaaaatacgaccagatgatgttgtactttcttcagtcagttcgacagcttgtaagcattcccatccaagcttatcagaagcaaacatatgtccccaaaatgcaccaatatttcttattaacactgtctcatacttatgacaattttgataattttctttaaacaatgtttcaaatgcatcagaccatcttggtcctaaaacaattaaaatttcaccaatcaacccataatactttgaataaaccttttcttgagcacaacatttgacaaccatatcaaccaacatgtactcttttctttcagggtcaattgctggtaatcgaaggagtttatgagtaacctcttctggactcatactggacatgatagttaaataaacattcttttgaaagttagtaagttcttgttcagttaaatctttaatttgaacagttagctttcctttctccattaaattgttactgttatcaatgtcttcgtcatcactttcatcaatgttttcattatcactggaaaaatcagagttatggtcttcattatttccagtttcatttatatctagacctgaagtttgatcatcctcaccatcttcatcatcacttcctaaaatttcagtcttcaaagccctgtacttctcgttcaattcacttgtagttttcatcaaagtgaaaaacatcaaactgagaatctgttgaatttttatctttcaaattgatttgatgaactacacaatcatcctcatccacaagatccaaatcactctctattccatcgtataaatcaattttttcctttagaacgttgaacaagttttcaattgaaaactgaattctattgttgacaatattttcattcatcacagaacgaagtgtatccttcacactatcaaaccatgtaggattttcatcatagataaatggaccgatgttttcaaaaacatcaaccactagtttaacactgaagtttgttggtttttccatcaattcgtttacaatctgaactattaaatcaattgaacatacatgaaacaaaaccaagttagcaataaataaaacagtgctagtacacagagcttcttcttcttttctataataccttttatatctggaaaccaatcgccttatcaataagttacctatttccggtatcttagagtttaaaacacataccaatgatgcataaacaccagtatgtgatgatgacagttgttgcgatgccatcaaactattacagaataatcccttttcctctcaatatattaactttaaagatttctacaaccatggttttcaagttttccttattgactttattaacaattccattgatcctcttctttaatttctcccaatcttgtttttgttgttcttctggtgatagttcatcattttctttcatcaaagcacgtatttttgcagctgggacatatttccctctttgtttctgctctagtagtttttccaattcagtggacatatttagatgtatattctatatatatacaagaggaagcatgcatgttgtaaagtaaacaacttggttgaaataattttcatgctatagtgcagatctgatgcacaaaatatttttgaaccctggggtaatcttatggcttctacggacaggttttcctttggccattcaaacatttcctacagaataatgttagctgtcatatcagaggaagaatcacaagtcagaagattttttaggttatgtttttagagatttaagtgaaagagaatccagaaagatcaatttatattcttgttattccaaaaatcactagaacccgttaccatatcaattttactgaatcagctagataaagtatataatacattctttagagtatctaaggaggataaaaaagattaatcaaatttttagcttgttttatgatgaaaactacaacgaaacaattgcaaagaagaactgggatgtagcaacagtatcatcaaatgttgatttatctgaaatacctaaatcttatattcgacatttaaaacaggataacatacatataaaggcttacccagcaattgaacaattcgatttgaaacctcaaaaatacaatcttcacaaaccagatgcattgatgggttctatacctagttgttgctgttggaggaacttttgatcatttacacgatggtcataaaatactactcacaatatcagcatttttagctaaagatacgttaattataggagttacaggaccagaattattaaagaataaaaaatatgctgaatatatgcaaccataccgaaaatagagttgacaatgtgcactcattcttgaatattattggatcaacatgttaaagtcgatttttatgaaattcaatgacatttgcggtccaactgcacaactagaaaacatagatgctctcatagtgagtgcagaatcttttgaaggtgctgaatttgtcaataataagagaacagagaaaggttggaagaagttggatgtttacgcaattggagttttaggaagctctgattctgaaactttccaaaacaaaatgagcagtacagattacagaagattagagtacttaaaagacaattctcgagatacataaatacaagcaaaccaatttttaaaagcattaattaagatgatatatgtgaatatttatataagtaaaatcgttgcattaaacaatatcatttgatagtaatagatgattgatgagatgcacgtctggattttctatcaggatgatcaatgaacaacttgtagtcttttctttcgaaaatttgaaacaattccgtatctgattcaactttatcaaaatattggaaagaagtacccgaaataccaaattttgcacatttaaattccttgtcagacaatccaagtagttttcttaatcttaacattgtatcaggaaatttttcaccccttacgacatcaaatatgaatggtaaaccatgtgtattctcaggacttccataacattggaaaccattgatcaatttcacattttcattgttaatttgattttgataaatttctttgaattgggggaaaataccaataaccagagcaccattaccatcaaattcatcatccaataataaagttttattgattttgtggctgctatcaggaatccagcaaaatgctgaatccttttcatcatcggatatatctattttagattgcatcttagtaacaatattttcaagtgtacttgattttggtaaatagaaatcatgtctttcatccttacaaataccattaccaacccagaaaatactatataattccataccttcaaattgttttaatggaattttgagtatttcagtaatttaaatagattgtattttgtttagatatatttgccaatgatttcttgaagtcataatctgatctaagatcattcttctgattatttgaagtatgagataatttaatatattcaggatcaacagagatagcttctcctataactgtaaccaaatcaaaatatgtactattatatgataaccagacatcaacagttgtattcttggaattatttttttgttcactaacatcaacaaaaacataatcttcatcatcttcatcaataatttgcagtttagagaaaataaaatgaactctactctcaagatattcgtagcacatatctgcatttttcaatttgatggtattatcaatagttgtatcacaaatagtagcacatataatatcaccatttgaaatttcagattgatacaatgtacttgtaggtttaatatccaaccttttatggtagcttaattcttcagtaaatgtaaccatagtatcatcgggaatagtcaaaatattatttatcaaactttctataaattcaacagttgattcatgtgggagtatcaaatgtgacatagatttaatcttttgagctttcaatgaaaaatatttgatgaaaactagaatgttagatgtatttagaattggttctaacacagcatcattatttggatttgcgtccataaactcaattaaattgtcaacattttccacattagtatcattttcaatagctcctaaattagatgaatgattagcaagatacttcaaatcttttgctgcatcttccaaatataaagaaattaacattggcctttcatggcctgaatattttcttctagaaactccatcattcaatttgttacaaacatcaccaatttttatatcttcaacattggagatgtattcgtcaattgggaaatctggtctatatgttctattatctctcttaactatattccataatctcaatttatcagcataagatggatctttaccaagtaaatcacaaattacagtataaatcgatttccaagagtcagtcttcaatattctgaatgttaatgggaatgaaccttcatcatataaatctttattaaaataatgggaatcctcgacatttggcccgatatcaaaaccttcaaacttatggaatgtattatcagtaaataaattaaaattaacatataaatgcatttcttctctttcctttttgattcttgcttcctctgcggtttcatattcgatttgtttagaaatatgaggtggaatgtcagattcttcaacttccgctaacacatcagggattttagattctctaatataaactaacatataagcaggaggtatgatgtttaataatatagttttgatattcttctctagtcatttgctttagttacattttctggggcaccacatccaaaaccttcttcatagatagtatgatgagtaacacgtgaaacaatgtcatcgtcaaacttaaaccacttatcttcatcatttggtttaatcatggcataatagtgaccaacagagacatcaccctgatgaactaaaacaccatgtaacttataattccagttttcaccatattgttcgaacagttttactaatatatggctgtagatcaatttcatcaaagaattcgaatctatcattaattttgaccatattatcatgtttcaaaatcgtattcatatcttttcaattgaatgtgtaaaacatctggaaaactttcaaaagtgacacctttttcagcatcttgtaaaccatatccggaagcatcatatttattatcaccatccagtatttccaattcaatataattatcaaaactttccttaatatttttcattcccttaacgtttaattgaatatcccaaaaatcttctgttctactactttcatagtcaacgttgatacaacgaataaaacttttcattttaccaacaaaaatatcatttaaacaaccatcaatttctgttcctttcattttagtttcaagacgatccatcagtattctgttcagttcttgaacatcatgttgtgtgaaagcatcagcagtagtccaaccaaatgagtgagttagctccattgattgaatagaaacatctgatgtttgaagtttgtaaaaaattctttgtaaagctaaagagactgttttagcctgttttttatattcactataaggttggattgaaagatcaatttcatcctcggttggaatttgatagactttctttctaaaagattttgtaaaaaaatatgattgtaacaaagaattcaaataacaagttgcaccttgattttcaataccgacataacctgtatattttttggaggagtaatctctgtaatttgaataaagaacatgtgtataatcatcaataactctaacataagtagttatattaaccatatttgatttcataaatgaagattcaacggcaccctttggatcaataaattgaacaaacccccaatctgtcacacgttgattatatctaaatctggtattatttgatttgtgtagtttcggattagccggattccatgcatcaatagtgaaatgtgcagggaatgaccatacttcaccaggatctttatcatcatcgttttcattatcatttccatttatcctttttaacatgatctttaggatgaccttcaagatatactgacaaaactaaatgatttcttttttgacagactaagatcaaattaaacacgtaatcaccaacttcaaaggaaggacctttaaaacgttctttttcaacaaaaagtgatgctagatccttgatttgaaaagtataatgaccagtaattgagtcaaaacctggtggtgctttttctaagaaatgttctgtattagcatcaaaatcaatttcatttaaatcaccttcaaaattattcatatcttcaacaaacatatcactatcaccatcatcattaccatcttgaccggagtcatcatcttcagatatttcatctatattttcgatattatcaatatcatccagaacaggaactgtaggtaatgctaattcttgatcatttttagacatatcaattggtgcatcaatatcaatggcatgtacatcatctttattagcagccatatcaaccgaatcaactgagtgcagacttgaatccattgtaattactatactatacacttataagatccagcaataagctcctttaaactgcatgtgtctaaaggcttactataaaataaatccttaagtaaataaatttattatgcaatcaagtattattaagccagtccaaatcggtatcgtcccatcgtcgctgatttttccagacgcgtcattacactatcaactatcattattacatcgataaagataactattaaaccatgtaaatatcaatataaactacagagatacagacaaactaatagtagtaaagtagctgaagaattcagaagcagtgaaaaaaagaaaaaaaaaagaaaaaaagacagctttataatacttaacatggtaacatcaattttcatcaagatcagagtaatcaatatcccataattcttcatcatcagtttgaattgtatctgaaccagcagcaatacttgcattttcttcagcatcacatatttttttatttttatcacttaataaatgtttaaaacctttttgttccttacgtacattccaatttaaaactctactaacattttcaaaatataaattattttcatttttaactgttgggaatgggaatcttgatgcacaaattgtaacatatccaccaacttctaatttcactctatttctaccatcaaatgctgcccatgcagttgatctactacgcgatggtactttaaccgttaatttaattgaatcgggtaccattattggtctaaatgataatgtgtgtggacaaattggtgtaatacaaatacaactcacctcaggatgtactaatgatccaccagcggataaactataagcagtcgagcctgttggagttgcaattattaaaccatcagcttgtgcaactgttaataaatgttcatcaccatataattctaacattgtaacataaggtgaaggtcctctatcaatagtcagttcatttaaaacttgttgttcacaaataattgtaccatcagctgcatgtactttacatgtgaatctcatacgtaaatcagttttaacacccttagttgcagcctttgataaaacttctctaaaattttcaaattcaaaattagttaaaaatcctaaactacctaatgaaaatgaaataattggaggaacaacattttgaaacatagttgaagcatgtaaaactgtaccatcaccacctaatgtaattacaaaatcaaatggaactgaatttgctagtattaattgtttatcccaaaattttaatctaaccgttgcagttggtacatcatttaacaatccttgataatcaaatctatgtgaagtttcaagttttttatcaacataaacattcatacttgaaaaattaactaataaccattcaaccatttcctttgttaaataaataagtgaattatctcttgccttagttataattataactgatttaacatttaatgatatagttgctctattcagacgttttgctaaagtacgtacactattagcagttttagctaaatccatatgagatcgtacagatgataaaccttctgtattattcaaagtattaaacaatactgcatcattttctaaatcattattcggacaagcaggtgctgatgctatacaattatgttgatgattatttcttaaatgcagtttctctaaaccatcagcaatataagatgagttttgaagattattaccatttttaccattaattacaactgataatgacgtactagatgatgaagttgatgatatagaagatggaatttgctgatgaattgattgtaaaagtagtgaatcatgtaaaactggttccttttgagctgatgaagaggagcgacgaatgaaaggaggtgatgttgtactattctgcattgatcagtgtatttatacaagttagtaattgaatatggagggaacaatatttttattaataagaaagtatcaattccaataaagaaaatggaaaaagaaatgtgctccttttaaataaattgcgatttcttatttccactgcgataacggatataacaggtatggagatagtaattttaagtattacattaactttaactataaaatatattaataaactgaagacggtatacaatactaaactataactttgtgactttacatttccagttggttttatcaagaagtggtaaagaagcacccaaacaccatccaagttcattaccaccaattgttttagcagtacgtaattctcttgtaagtgggatatcataacctgtatgcagaagagaagtcataaagttaagatccatacaccataatggttcatcttcaagctctttgatatgagcagcttgtgtgaaatattgatcccataaatgagaacctgaacaaacagatgacataatatcattcatttcttttaatgtaaaggaatcatggcataccaattggttgtaaacgatcatagaaatatgagaaaacgtacatatcagccaatgtagaaaattgatcaaggaatgatggttgatagacaccattaaatgaacatgatttagattcacatgcgagatctttatttaagattgtatctgttaataatttacattgaccagcaagtgatgatggagtttcattttctggtgaaatgaaagtaacagcatatttatcaccattttccatttcaacaacaacattatcagcagtgacaccaggtgggatacaaggattttcaatatcaatagttgaaataatagcgtctttatttttcagttgattagcatttaatgggacaagttttgatttttgaacttttgattttggaatcagctaaaacagcctttaatacagcggcattaactttatttctagcttgcattaaaccataaccgagatgagaatacttgataaaggatgaaatctctaccaccaaaattaatttcatatttatgttcaccttctaaaattttttcaccatcagttggttcaaagacaatttgagttgaaccaccacctaaatcaaagacagcagcggtatcaagtttctttgaagatccaatattttttcaataaataattggttgtgatccaagcataaacaccttcatcagaaccatccatgatggaaataccatcaccttcaacaacagggaatgggtaatcttcttctaaatgacgtctaacttcctttaagatagcatctgatttcgctgtacctaataatcttaaaccagcagtcgctttaactgcaacaggagtacaagaatgtttctcctttggaattgattttaatgctaattcgagtaatggatcgagtgaagcagctgcaccaactgtatcaacatcaaatgatgagagaccaggtttgagcattttgaaatcttcattaataagaactggtgggagaacataggtatcgaatgtataaacatgaacacgggaaccagtggaagcctgcatcaatcataataacataatcataatctgaatcagatgtagaaccagatgctgatttatctttaacagaatcgactttaccacctttaacattcgtattatcattatcagtagaatctgcaccagaagcaactttagcctttggatttacagcagcaacttcatcagaatctttagaatctgcaaaactagtcatttcagtttcaggtttatttttatcttgtaatttaccctttaaagaagcatcagaacctgatgatacatcagattttgaagaaccaacaacaaattgtttcttcttttcagcatcttttttatcctgttcaattgtagcacctgataatagagtatcatcattagaaattaatttattagcaggttgaacagattcaccgataccataatcagccttatgaatagtttctgatgttattgaaccaggaataggggatccactccaggataatgagaagagaatcagtgcaaggacaacaactgatccaatcactaatggtcttaacttacgtccaccaacagaaagcattttgtttataagagaaacaagagagttagatataagaatcaaagaaagaagagcaaataaaccaggcatcaagagtaattaaaatagattaaataaatgtatacgactttgtccataatatagatatcgcgtttgtcttgtttattattattaataggagaaatttattatcaactgtgaattttttgattttagaaagagttacgtagtcttttcttttttttttggttttctttgcttttgcttttgcttttgcttttgcttttgcttttgtctttgctttgtgttaatggatctacaacagctggaagctcgtaggaaaggtttactcaggagaataaatgctgctcttataagattgaatgatcccgcatctatcagatgaacagttgagagatactaatgatacagtaaattcacttttacgtcaacgtaggacgatgcgacgcgtcctatccgtaaattaggtggcccacattatccacaatcaacatctaatggtacatcaattaaaggtcatttatattttggaagagcctaaggaattacctgatgttcaaattttacttcaggaggctgaacgtgaaagaaaggaagtttaattcgaaaaattctgatgaaaataggttaaataacttccgtaatgcaaaattacctgattcttatccaacttaatatagattatgaatcaataaagtctaataatgaaggtttaatcacgtttgaactttactaataccccagatgttcaggcttttataataaaaaagaagaaagaacttttattgaaaagacttaaatcatagtatattatgatatagtaattccattgtatagtacactcattgtataataatcaaaataatatttataaagtaaacaaaactatatattgtctatttatcagataagtaaattaacacctctttgtataatctccttaaaattacttgcataatacctctcatcttcccaaataacacgatcaatttctcttcttacctgaatctaaatcaatttgatctaatctctcaattttactccgacgtaaaatccaccaacctaaataacataaaataaataagaaaacacatccataacttgaaatgaaaaataattggtgaccagtcaccatgaaggaaaacaacaaatcctgatgcaaaaactaagaataaacttaaaaataatccggcaactgctaagtatggttgaaatggtgatctatatggataatcaacatcattcctactaattatatcaggtcttaaccttaatgcataataaaatcttataaatgaaagacacatacctgaccaaactaataatccagcacttgcacaaacactaactaatctttcaaaaatcaatgctgtatccttttgaacacttaaataacttaataatccaaatgatccagtaaataaaacactcatatagggaacacctctcttagtacaaactgaaaatattttaggtgctttgttttgaattgacataaaatataaggttctagaacttgcataaagttgtgatgacgcagcagttagggcaaagtaaattaaaaatgcattaacaacagctgcaaatgaacataatcctgtactttgtatagcaataacccatggactttgactaccattagaaaatccctgcccaagttattatttcattagaacatctatcagtacctaaatgttcaataacttcattttgtaacttaatcaattcatcgggtgatctaggatctctttcacttgagaaatatcttaataatcttggatctccactataaatatttaaaccaacctaaaaatatagcaacaagataaaatacgacaattctgatataaatattctttgtagcacttggtatagattctcttggatttctagattcactacctgctaaaataacaatttctgttccaacatatgcataacatgcaataactgatgccatcaaaatttgtaaaaatctacctaaattacctccaataccatttaatgcccccattcctttatcagctacatcaaatgttggtcgaaataatccaaatgttagatgttcacttatatcactcaaatgtgaatcccaatatttaaatccaatgacttgatgttctggtcctgcaccacctctattcatgataatcatatataacatcaatacaagtaaaatcagtagtttaataattgtagagtaatactcaaattctccataaacacgaatatcaaacaaattcaacattattgtaaaacatataaataatgtaatccaaccagctgtacttgcaccaggtatatttaaattcgaataaaatgaaagcataattgatgcagctgtaatttcagttggtaaactaactgtataagtaatccaataaacaacacctaatgagaaaccgaatgcatcatcaacaaatcgagatgcaataccactaacaccaccacatagtggaatcaacgtaacaatctcacagaaggataacattgtggcaataactatgaatgcaccaataacaaatccaatcaaacaaccaaatggccctgcaatggaaaatgccttaccagaagacaataataatccaacacctaatgttccacctaatgctatttgatgtaagtgacgaagatttaattttctttgaatttgatatttgttagcacgttgaattctgatcattttgaagatattgagcctatcaattaacattaataaaaatttcatacatttatttgatgatttgggtatatttgaatcacgatgttcaggatcgatatctttatataattcaattctatggaaatcataatctaatttatcttgaccactgacaactatatcgatatcatcatcaaaatcatgtttgtgattattataacttatattgccattaccattaccatttcatttccatttccatttgaattaaattccagatctctgttcatttttctgaaaggttgataatcaataggtaaatcttcaattcgaatatcatcatctatcggtattgaactgaaagttgacacataatcttcataaaaatgcttctccttttccttctctttgtcattttcagtttcatttctattgtttctttcagctttatattcactatctctacttttaacacctcttaataaattaaatatcttattagatctaccattattaccagttcgtcgctcgtcaaccgagccaccaacatacatctcattaagttcatattcatcaaatgttggcaaggcattacttcattctaccatgttcaacatttctagctttcctctgtgccagattatctagctttccccttaatacttcttctcttagtaatattcgattgtaagtatcaaaatcagtaaattctaaattatgttttgtattggagtatttattatacattttgctcaaacgaactttatcattatcgtctgccccatgaaatgtttcattatccaacattctatgcaatacagagctgtgaatactacccatttcaggtacatctatttcttccttagcgatatgatttgtaagtattttgattgtctatcactgagtcatttatactattcctatcatttatatgatctagtacatcttcagcaccatcattattccccatactgggaaacaaactagacgatgactgaatgaccctgtctcacccgagtcagtacaccatattgctctccctttaataagtcctctgttgtatatataataaaatattgagataacaagcaggtacgaagattttttatctaatgcacgaaattaatcttgaattccaatttttcattaactttgacacacccattcttctggtgttctacctttgtgtttacaattgtataaataatataagcacctttgacaatgtctactcaacaaactgaaaagagagttcctctttcaaacgagaagaaccctgttgcattaggagttgcaactgcagttcgttataatactctgcttaaacaaagacagggtgtcctttcaactactaaatctaaggttgatttctttagatttaaaagatttgtacgtgcagttcaatcaccagaatttcaaaaacaacaagcaaaacatttaaaagatatgccaccaattccaaatgatattaatgcaattaatcaaatttttgtgttacttattcaaaatcaattaatcgtccccgttgttaaaatgaagactaatgttgctaaaaagcaaggttatcaaatagataaaaatacacctgctttagaagttcaacaaaaggcaattattcaacctgatgcttattatgcatggaatttcactccactgaatccattaatgccattatattctatcttagccgtaattgcagtcttcacaatcatcttattcccattatggccactatggatgcgtaaaggtgtctggtacttatcaactgcttgcctatgtttagttggtgttttctttggtactgcaattatcagaaccatcatatatgtcattacttgggcaacaatgaagcaacaattttggctattcccgaacttatttgcagatgttggtgttttagatagtttcaaacctgtctatgaatgggaagatccaagtaaatctaagaaaggtaaaaaggtaaagaaagcaaaaaacagttgatgaaaccgttgcaaaacctacagtatcaactacaaccacagcacctgcaactgctccaaccaataaaattgaagaaattaaagacactaatacatcagctgttcaatcaacttccactacaagtacaaagagacgtgaaccaacgattgaagatgttgcagaagactaaaatcttttcttctttacataaaatattcaactaaaatttgttttatacactttttttataatataaatatttatagctagacttaagcgttataagtttgctttgggaatggataagatggaccaatttcctgaattgaaagtttagctaaccaatgacccatatcaatagattcatctaaagttttaccttgaactaaacctgcagtaaaaccagctgcaaatgcatcaccagcaccattagtatcagcgattttagatgattctaaagcatgaacagcaaatgatttaacatcaaatgaatctgcctttgcattgtatgaaactgccaaagtagaatcagtaccttgagtgaagataacaattcttggtttgttttcgttaacttttggtaattttgcaacatatttagcaatttcagttaaatccttagtatctaaaccgtgagattctgcataagctgcagcttcagattcattacagataatgtaatctgcatatggaacacaactgtctaaagcatccttgaagaattgtgggatgaatggggcagagaagttcataatgaagtctttgttttcctttgctgcatgtttacctaataattgaattgcctcaggtgaaacagttaaatggaaaccaccaatataaaatgcctttgcaccttcaacgtgagcccagttttctggtttttctaaatgagatggtttgaaatggttagctgctgctaaatcagtaactaaagatctgttaacaccattgattaaagcaccacatttaccggttgcaatatcatcttgtaccatgtatgaggtagttaaaccaactgatttattagcttcaattaatttatctgcatagatatccttaccaacggaaccaaaataaagaacagattcagcaggaagaacatattgtgcacctctagcagtgttttgtgctgcaccacctgcaacaagtttaacatcatcaaattttaaaatttcatcgaaaattggcatgtgctttggttctgcaagaattgcatcgttttcctttaattcgtatttatctaaatattccttttgaacatcaacttgaatatcaagaagtgggttacctaaacagacaagatcgtaagccattgttaattgtacttgttaaaagaaattaattgaaagtaaaaaagaaaagaaaaaagtggtgatgaaaatagaacatgacaaaatcgacatgaaaattattaccatgtgaagaaattttcattaaatttaatttgacttctttctttcacatgaaaagttatcgttaaatgatgttattatatacatgtttttttattataagctacaaaacattcttatcaacatatcaccttaacaaactagcccaactgtcaaatgcatttcgttgactacatccacttctatcgtaaacacctactgctcttggcatccattgtgatatattttgaaatcttttctctgaacttggatgtgtagataatagctctggaacattttgtccaactttcttttcataattcatcatatttttccataattttggagcttgttgtggattaaaacatgctcttgacataaccattaaaccaatataatctgcctctgtttccatttctcgtgaaaatgatgtgttaagaaatgcattaactaatatatcacccggttgagatgtaccaaacagtgaaaacaaaattaattgtaatgtaatgaaaaatggtgacagtgttaatttttcccccagatgatctgctaataaatgacctaattcatgtgataaaactgttgctaaaccatcctcatcttcacaaattggtaaaatggatttaaatatgaaaactttaccacctccgatgacaaatgcatttggtgatgcttgtcccattctaacatcatcaatcacatagaattcccattcatcaagtggtatatcacttttacctaaataagtaaataagtttatcttttcaccagtatcaggatctgtataatcatgagctgcactaattaatcttaccataatactagaaacttgcttggataatggatgatatgatggtaatacatatgcaccatattgtgacataacttgtctaaatgacatattagtgaatatattttcaatccaatctgcagtaatcataagtctgtatctatgtgtaactggagcctgttgaatgtgtaaaacaataaaaaagaataccatacctccaaaactatatgcaattcgacgttgttgaacattcatattcctccaaatatctctccaactgttaccattgcttcttctttgatacccttgatattgactcttcggttggtcaaaatagacataagttggttttcttcttccataatgttgtaatctaacttgtgttaagggtcttggagttaatctagttgtaagtctaggtatcatccggctgtttctagtgtataatccaatgttcatcatcttgatttgtttggtcagaaaaagagactacttgttaagatgatactcggaattaagcggttaattacaatttaatctctctaagtcctgaccattgggtgttttctatagaatataactcaatatacagagactatataacaactttatatatagtacttattctctttacgttgcattacaacttaatacttctaaatatgataatatgatcagtaagaaaatcggtaattggaaattatggacattgacaatatcgaagaatttgattgatccagcatttaactgatttgttattgtttctttttcttgatcaatttacaacctaaacatttgctatataaataatgtcacgagaagtgacactctatcatccactggtgcttctatatggacttggaacatcagtcacctataattggcggttactccctatatcacagatattttcgacgtattaaaagagctattgaaataccatcatattatttcagaaaaagatttatttatggtaaagtgacatctgttggagatggtgataactttcatctatatcatttaccaggtgggtttctctctggttggggttggttacggaaagttcctgaaatcaatcgatttaaagaattaaagggtgaaacgatagctgttcgaatttgtggtgcagatgcacctgaaagagctcattttggtagacctgcacaaccattctctgaagaggcattgatatggctgcgacagtatattttggggagatggttatacattaaaccattacatttagatcaatatcaaagagttgttgctaaagtactggttttaaaatggacaggttttaaggatgttagtgaagagatgatcaaaattggccttgcaactgtttatgaagccaaagcgggagctgaatttgatggtaaagaaagtatataccgtaaaagacaaacaaaagcacagaaaaagaaactcggtatgtggagtttaaacaagaaagatctgcaaactccacgtgaatacaagaacaaatacaataattgatataatagaataataatgtacctggtttatataaatttatatgataccaattataaacgtatattgtatttctaagtagattaacatttaacatcaacacctcttctattttcagcttctctgagttcaaacattacttgagctgcaatgaacaaacaaattgtagatgtaacaaagaaaacaataccatcaaatgtagttaacatatcctttaataatttaaccattccatccttaccaagacaaaatccaaataggttagctaacatcatcatccagatattggaaactgcacctaatgcacatgcatgtctataccaccacttatttttatatggtttaataacctttgttgcaatcatttcaggtaataaaaataaaacaacaacccaaccccaaattaataaccttaattcaatatcatgccagatagcaacaaatgagaaaactgcaagtgatcccaaaattctataattagaaccacctaatggaacataaatgtatctgataacccatttattataagatctatgccaagctctccaaaattgcatcgtggagaaattagttatccatacatctaatcatattctcaggtgggtctatattatcacataatgcccaaaatctgaatagtctccaaggaatcaataatttcatccaaataatattcaaattgaaaaatccaatcatggaaatttgaaatggtgaatctccatgccatgctttagctttagacactgcaacaacatagatataatgtaatataaattccattacaaggaaacagaagattaatctcaatccataaactaagtttcttttcaatgtaattgatggtaatgtatgtcttgattgatatatgaaatcgttgaatgtaatgattggaccaacaatatataatggagtgtaaagaatgtaagcaagataattcttgaatgaataatcagttaatggtaatggagcatctaatctttgtctctctgttaaatgtgaacttgctggaactggtatctcgttttgctttccctcagaaggatatgataaatcttcttcgctagttttagcctttaatggtgtttcaacttgtgttaatggtatctcattatttgatttttcaattgtggtaaatctctttaaataatcaatattaaaacttaaaattcttaataatgtgaaattatagaaaacatcccaacgtgcaattaatcctctataagagtccataaatgccaattgacttataatttgtccaaatttaatttgtctatagttatcattcaaaaataaagttgaaataccgtaaacccacaccaaaatttgtgcaagtagaggtctttttttaaatatccttgttattgcaaatgcaataaataacaaaaataatattctaatacaattgaatccatgtaatacaaagaaaaaaatcaaaccaaaacccaaatcaaaatccaatctttcaattttgaggtaccttgaaccaattcttaataatttatggataccaacgaacgctaataacatgacaaaattatctctgaaaaaacggtactgtagatctgaattatcaactttcctaccaaatatccaaccatcagataacaatcccttatatatattataatttggattagtttcattacttgcatccattgcagttttaaacaatattggaacaactacacagaaacatgccatataaaatctgaattcattagatgaccatcttgaaggttttttctcaatttctctaccattattaacggtaacacgtgtatccaatgcctctagtgacagaaacggacacacagacattgcttcgataaatgttcctgaaagaaaaggtgttttatataactgggcttaaacttgaataaattcagtgagggatctggtaaaggtaaacatgaattcatgaaatttcactgtgcacgcaaatttttgatttactgaagatgaaggtttatttttagtatatatttgtgagtttgggaggtacaaacagttagttaatatatatcacatacatcagacaataatgagtgaagataaatctaataaaaatggatttcctgaattagagagaagacccaacccaccaggatgggttcaaccaaaagcaccatataatccatacgatccaactgatttaagaccagctgaagggtacccaagtgaatataatgcaccatcagttatgaagaaaaatacaggtaaaatagctcgtgatttaacggattatcaaaagattaaaattgatatgaagaaattacaatattatccaagaccaccatcagaattatatcctggtagatataaagttttacgtaaagttaatcataagagtggatttaatagaggagcagatttaacagcaaaggtaagtatatataccgttttaatatttggagtttttttctataaatggaatgatcatgataatatattttcaccatttagaagattacaattaagaattaaagaatttataattggagatttatcaatggatgattataatgatttatattattataaagctgataaaccaattccacaaaaaccattaccatctataatgtatgaaaaaaatgcagagaatcaattagttggtgaaactgcaacaaataatgaatttataaaggatagatttggtaataaacatgttgtttatgctgaacatataaagcaaaaggaagatgagaatatgatacaagcaatggaaattgcacaacgacaattagagttgaataaattaaatgaagttaaaaatgatactaagaaaccattttggaaaatttggtgaatcttaactaaaaattctgtaaatataaataaataatcttattattaataacgtttaatgtattcaaagaatgattcatgaaatgattgtaataatactatatattaataactataaacaagtaatgctaaatgactaataataacatataaattaaacttatttaagaccacctctctttatgaggaaatctttagcttcattaactttagttgcaatatatggagaaccacctttatctggatggttaagtaacataattcttctatgattatcctttaatcttttaaggttaatattagtttcctttaaatctaagatacgtaaagcttcctttgcattcatttttggatcaaaaccacctttaaaatatttaccagaagatgagccataaaatttcttataagcaccagctgcaacataagtagctgcaaaacatcccataaacgttataaaaggatgtgctgacatataatcttttgaattttgaagaaatttctccacttgatctgaagcagattgtggaggtggagtttgaggagctcctggtactgggagtgttggtacttcaacgttttgtatattggacatattgattgttggtataatatataataaaagatcaaaatataaaaaacatattaatgcatgaatacaaaaataaatttgaaataatttgaattaactaatttccatcagtatcattattagcattattatcatgaactcaactgaaaaaatgaattttggtgaaaaatgggaaaaaaaaataaaacaatatcgactctgcgacgcgtggttgattctagagcacactcatacataatagcgaccattgctataagtacacttgtaattatcaatcttatctttaacgatttccttgagtgcagtgttatcacttacatcattgatagctgctaaacgagtgaatactttcgttcttgatttgtctgattgagccccttttttaagttcctccaacattacaatcacttcatatggtagcaaatcaatattcacctcatcctgatatcttttcaatattctaagttttttatctttctctgttgcttcagcttgaagtttgttgtgagattcacttaactcagtatacttctttttaatttcttcacattctattttcatagtttcatactcttttaacttttcctttaaataagtattttctgaattaatttctgttatactgtttaataaatgttcctcccgttcttcggttttagaataaattgttttaagaaaatctttatgaatctcatttatacttttctcatttgcattgaggtagtctgaaaaagtaagttcctcaaaatcgtcaaaaatatcatccttgatatccttatcattgttaacatcatcagtatctttatcaactacttttttgccgtcgttatttactaacattatgtttattctctcgtttttgttttttgtattgtattttttatcaactgacccagacgcaaaacaagtaaagaagtaaagatgaagccaaaagaaggaagacaagatggaagcaaattgagaaaatccagatgagccctcgggtagcgttataaaattaaaaacttgcgataactacgatgtatagcacttttcaagctaaattaattacaaaatatgaactgaaaaattatataaatgaagaaataatagttaataaatataaaatgttctttgtattgtaagattaaatatatggaaatatcattcttaagataatctccttatttaaaagaattaagatcacacgtttcgtacctattttgcatactttacaatactatggactaagtataacaaatttgattaatatattatagacttgctactcttacggtttttcttcatgtaatctatttggaaattattgtacacagagaagtcatgcatttccccagtattcgtcgtccctctttttagcacaaatatatgcatcaagctttttttcaaacatatagttgagtgcaatgttaccaattgactcattaatgacttttaaataagataatatgttatcattatttaaaggaggttgatttatgtttcttaaaaggttcaacatgtggataatatcaattggtaataattcaattttgatttcctcctgatattttttcaaaatttcaagtttgacatctttttctaaggattgagctttgatcgtgttaaaagaatcaactaactgattataatctttaactaaatcttcattttttttccttggttcttgtactgacttatcatattaattctttttatcttcataatcttttaacttttccatcatgtgattattttctgattcaagctcaataattctattcattaaatttgcttctcgttcttcgaatttggagtaaactgtttcaaggaaaactttatggatatcatttatagtatcatcagttgtattaatgtaatcagaaaaagttaatttttcaaaatcgtcaaaaatggtatctttgatatcttcattattcttagagtctcgtatatcttcaacaaatggttcattactctggtcacacattgaaattgtggttttctccattacaactatataaatcaaagaagagcagcaaaaatgaataagccattaggtagcgtcttatcaaattatatttcttgtgatagataagctttttccgagattatacacaattttattggtttcgaaactgtttgttttttgttttttttctttaaaatgattcacataattacaatcaagcactacttaaaacatgcatcattggaaagataatgaatcatacaaaaatataaaagttaaatagaaagtctaacttatattatgccaccctattgtaactgatctaagggtgttttcttcaaaatataacgtgtcaatgtgaaaacatcatgtctagtagtacgagttgtttcttctagaagaataagaagaagatgacgtatatgtatcaatcattttcgtaacaatatttttgagtgcaatgttactactcaattcattaatgatatttaagccgagatactacatcatcagtctcttttctataacttcccaactttttctatcaaaagcatcatatcatatggtagtgattccaactcttcattctttttctttaattcttgcattaatttatcatcgctttcctttatattttcataattttgtaattttcgctttataaatttattttcacattcaagttcaataactctgttcatcaaatttgtttcacgttcttccgttctagaataaattgttttgagaaaatctttatgaatagcagttatagttttttgattagcatcaatataatcggaaaaagttagttcttcaaaatcatcaagaaattcattatcatctttatcctcattagcatcattactagtgttgtcgtctttaaaactcttatcaataataatattcttatcgtctccagactcagcaactcccttatcattattaacagcttgggtatcttctccaactgcagtattaactttgctattttctgacattaaaacgtttctattgttgctactttaacaatgtatatccaattaacacagatttcaaatgaaaagaaataagtgaaagtattaatccaaagataagaaagccccaattaatataactaattaatttaatttatgacagggggctcaattattacatcatcttaaatttaacaaggcgctgctctagatttgtagctgtctgaagtttatacactttgtaatttatttttatttctctaatagtactactaacgcccaattcaaaaaagataatagaataggtgtacaatcgatactggattctttgaagattcaaaggtttactatgtattgtagtgacatgtgttcttatcagcttgttattaaaaatgaaatatatagtaataggtagggatcaaaattttccgtagggaaactgaaattatcaaactgacacgattcggttcttcacggtgaaactagtgccaataattacttatacttaagaagtccatggtttaagttcatatggttcctctaaataagcaatatcttcatttgttaatttcttataaaatgcaaatgcctcaattgcatcatcaactctttcaggtttactgaatccaacaattagtgaacaacctttgtttaaaacatatgacattgaaatgactgccattgaggtattatatttatttgctaattcttcaacccttttcaaaatcaattgatcgccttcacttaaaacatctaatcttaaatttttcatacgaccactctccttttcctcacgattagattcaccagctttaccataaggacgagttaaaatacctctagcatttggtgaccatggaatgattccaacatcagttaatttacagtattccatcatttcattttcttcttctctataaagtaaattataatagttttgcattgaaataaattttgtccatttattattttcagcaacattttgcatcataacaaattgatatgttttcatacttgatgctccaatatatcttgtataacctaatttaacaatatcatgtaatgcttccattgtctcttcaattggagttgttggatcaaatctatgaatttgaattacatcagcataagtacccaatctttcaacacttcccttggctgcatccattatatgtttacgagataatcctctactattaatatattcataagcaggaatagttgcccagtttttagcaactgaaaaatcaggatcatcagaatccactgggaaaaataatttagttaaaattacaattctatctcttttaatatgatattttttgatgaattcagctaataaaacttcagaatatccattggaatatacatcagcagtatcaaaagttcttaacccattatcataacattttttaagaattgtgaaaactttctccttatcttcaacaacccaatctgcccagctttttctaccaaaggacatacatccaacgataatacgggagattttcaatccggatttacctaaattagtattaaagtcagcaggaatagcagcacacattgtctttgtctaatagaagaattgaaaacagcattggaaaataattgggaaattacctcagtttaaatacatccagtgataatgatctgtggctatgaataaggtggaagtgcaaaaataaaacatgaaaacaatagtactttaactatcatttactatctttacaaataataaacactttatatatagagtccttttattcaaattaaactattgtaatatctggaattcggatctataatttattaagtccgctgtaaccatcgcgcactgttagggcttgtataatatacggcactgtcgacgcaaagtccatatctcaggctataccacatacagacacattatgcattaatattgaaattttattgagttatatgaacatttggcttattgtgatctcttctctttgttgtattagacactgtactgttatattgtttactaattttataatatttgcaaaatagtttgataaagttgttgatatttttttattatttccaggcactcgttattaatttttgaaaaattggaactttaatcaaaaaaatgttgctctacaaaggacttaatatctcccttttcttttcagtggtattattaacctttttgaagctattttataaaaagccagcaatttttacgcaagtttggttacattactgtgtaaaagttgtgttgagcttacaacaaaaagggtgtcgtgattatggtgaaaatttaagctttttttaaaagaaaataattatgattattacgtaagatcataaagttattataagtagggcttagcatttcatgaagggaaacttaacttttcaaatactaataaatcttcattattgttcgttctttaggtatgcatatacttggtagatcattattgaaaccattaactactgtcaataacaaattttggttatccactggtattgtcactttatctgcagcttattatattcaaaatagatcttattcaatgtcaacaactcaattcgtagctccacaatctccaattcaatggaatcatactcctgaaacaattttatcagagacaactaaactcattgaagaagctgaagctttagataataaaattggttcaattgcaattgaatatgcaacaattgataatgttattaaaccttatgctgatttagagaataaacaatccggtttaactaatcaattatcattttatcaatatgtctctgctgataaagctttaagagatgcatctaatgaatcagatgctaaatttagaaagtatggtattgaagcaggtttaagagaagacgtttataaagttattaataaagtttatttagataataaagataataattcattagattctgaaactaagagatttattgaaaaattaaataagcaatatgaaagaaatggtctttcattaccattagaaactagagaaaaaattaaagagttaaaacaagaactttcaactttatcattaaaattctcttctaatttaagtgaagaaactggttttaaactttatacaaaagatgaattagaaaatgttccagaagatgttattaaacaatttgaagaagttaaagaggaagatggatctgttaagtataaaatgactttcaaatatcctgatttattcccagttcttaaatatgctaaaaatgaagaaactagaaaatctgcatttaccgccgatcaaaataaatgtcccgaaaatgctgaattattaattaaagctgttaaaattagagcagaattatctcaacttttaggttataagaatttctctgaatatattcttgaagaaagaatggcaaaaactcctgaaaatgttatgaatttcttgaacgatttaaagactaaacttaaaccattaggtgaaaaggaatttgaatatttaaaatcattaaaggtcaaagaaaccggtaagtctgatactggttataatatttgggatcaaagatattatcatactaaaatgttagaaaatgattataatgttgatgatattaaaattgctgaatatttcccaatgaaaaacactatttctaagatgctttcaatttatgaaaccatttttaacttgaaatttattgaaattgctaaagatgataaattatataacacttggcatgaagacgttaaacaattccaagtttggaaaatggacaatacatcaaatccagtattcattggttacttatattttgatttacatccaagaactggtaaatatggtcatgcagcaaactttggtttagttccagcttatattgatgttactactggtgaaaagaattacccatccacctcattagtttgtaactttactaaagacacaaatgacaaaccatcattattaaaacacggtgaagttgttacatttttccatgaattaggtcacggtattcatgatttaatgggacaaacaatttattcaagattccatggtacatcagtcagttgggattttgttgaaatgccatcacaattattagaatatttctgttgggatgcatcaatgttaactaaattatcaagtcattatcaaactggtgaaactttaccaaaggaattaattgattcacttattgcatcaaagaatgttaatggtgcaatgttcaatttaagacaattacattttggtttatttgatatggcattacatacttctatcgatggtaatgttaatgttgataaattatggaatgatatgcgtgaagaaatctgtttaattagtaacggtggtgttgatttcaaaggttatggatcatttggtcatttaatgggtggttatgcatctggttattatggttatttatggtcaaatgtctttgcggctgatgttttcttctctaaatttgctaaggatccattaaatgttaacaatggtatggattaccgtaacaaaattcttgcaagaggtggatctcgtgatgaaatggataacttggttgatttattaggtagaaagcctgaatctactgcatttttaacagaattagggttatctaaatgaaatatttatgtgtaaactgtagataataataaaagaattttgaatttttaatgtggcgcattatttgtcagtttaaggatcatctatatactaatgcatattctttttgtagaggattcaaacatggcatcacatacggtatatatacggaatctcaatgaaaaggtttcattaaaaaagttagagttctcattaagagaaatattcaatgaaaatgggttcccagtgaagaatattcaaacatgtcataatatacaattacgaggacaagcatttgttgtatttgacgattccgttgagcttgatcaagtaatggatacattaaacactgaatatgttttaggaaaaccgttgcatatccaacgtgcaaagaaagaaagtgatttagtatttaaaggaacagataaatttaatgaatatataaccaaggaacgtgaagaaagagttaaaagacgtacaggtaaggataatagcaagaaaagaagttatgaagatgatgaagatgttgataatgacgaaaataaaccaaataagaaacgtatgaaggaaatagtaccgaatcgtatactcattattactgaacttagtgatgaagttacacagagtgatttaattgaattatttgaaaaatataaaggatttcttacagctaattatgtttcagtacgacatgttggattaattgagtttcaaaatgaatctgaagcggtggaatgttataaatctttgggtgaaataccattagttaagggtaagaaatgttcattaacatttgctaaaaagtgatatttgtttactttattattcgagttatatgataatattatatatacagtgtaagataaatagatacatatatgattgtaaattagaatttatagagatatggtttgaaactaatatctaccagtgataattgttttaaaagctgtaaatataccttctttcttttgaccacctttagtaacatcacctaaaagacgattataataatttggattaccctttggttctataagtttattagaaatagtataatattttgaccatttattatcatgtatatttttcaatgatttatattgttgttttaaaatatcttcattaaataaattattttgataatttggcttttcatcagtttcagaaaaaatcattcttttaagtttagctggatctaatttaataataacttgttgtttcttgtcttgaattgctttctcatctttaacttcttttggaacttgaattcctccaatattacagaaacgttcaatttgggtatatttaaaagatgcataatgtttaacagtatcagcaggaaactgttgtaaaacagatactatcttcttagcatatgagttagtagacattgcgtgagatgggtgtatacttggctgataaaggaactaatctattccgtgaatttaaatgaaccactaagaaaagatattttactaatgacataaatttttcaaatttcatgtttttcttccatgatcagattgatttactggatgctttatttctttatacttatatgttttacaattaatatatacacttagatgataatgaaggaatataatacatatactatgcgtttgcctttctcttcagagagagacttaacattttacgagatgttttaagtgcttctttcgtttgatctgctttaagcaaatcaatagtttcctgtcgtaactctaatactgtgtctagcttctcaattagtcccaagaatctatcaggtcttagtttccttaatgattgtgcatttggaatataataaacatcatgggctgatctaacaatattttgtactgttaaatatctttggaaaatcttaattctcatctttgttgaaagtgattcacatggaacatgtaagaaatctaaaagggcttcagtaaatgaccacatgcaatcctttaattgttgtttggaaaattcatgtatatcattaacttcaccattgtataatggtgaatgatctggtatatgtgaaaaataaattgacccccaatcatcaattgacaaataagaattttctattgttgaatataatggtttaccatcaacagttttactcttgatcttttcaccaccttgtaagaaggggtacaatacaaaatgaatatcaaatgaaccatcttcatttctctcgtattttttagtttgtttgtaaatatctgctaattcagctaaatcagttaactcagttgggaaataatcatcaatttcttccacttcaaaatctgggtttggattgttcataggtttggttgcaaaatatatttcgaatttgatatagtccttaaactcttcaaataacggtaataaatattccttcaactgcagattgcatattaacattcatcaaatctgcagcatgcaataaaaaactttaatctaataacaactggtttatcagtcaataggcagaatcaactaaactattaattattggaaaatcactataaccaatactatttataaatgtatttttatcattagtttgagatacataataattatctggtgaatatttctctaattcatctctaaaggcatgatcaataattaattgagttaagaaaaatgggaaatcattagaatccaatgcatcaagactgaaatatatttcaccataattacgcataccatcaacttgtaatccattctctgaacttaacacagaattaacaaataaatcatcttcaggatacttaccctgtaaatattcttccttgctaccatttatcaatttaactttatacagtggtaatgtgaaaaattcttgtcttgtacgtgcatcaatttgaatctcagttgtttcaaataaatcagggaaattgaattcagatgcaaatctaactgggattataagttcaacatctcttaatggattttcattaaattgtaaaattgaatctttatgtggcatgcatattgataagatgaattaaatttataatagggtaaatgattgtagttatataaggtatggtgatcccaatgagtagtattattactgtccattgaagataatttgttttctccttagatggagcagcctctgatacctgttcagttttactctccattgacttttgatgaatgaatcaaagacttgaataatagaaatttaccattttattgttgcatgtcgtgatgaaatgaaaattatttttcaccaaaagtttaagataattttttttttccttttattaacaaccaactataatatcaaacatgtcgggatcagttcaaccaactatagaggagatacaacaagaaactgagaaatttcattccagagaaaattctaaaatcaaagaaagtgaatttgttcatgatgtttataatgaaattgcacaacatttttcacaaacaagatacaagccatggccaatagttaaagaatttttagaaaccagagaggacaaatctataggtgttgatgtcggttgcggtaatggtaaatatatttccataaatccaaaattatttataattggatcagattattcaacaggtttaattgatcaagcaaaatcattacataaaggtgaaaaatgtaatgatataatagttgcagatggattaaatttaccacataacaatgataaatttgaatttgcaatttcaattgcagttattcatcattttgctgatgaaaatagaagaatagatgcaattaaagaaattttaagagttttaaaaaaaggtggacaagcattaatttattgttgggcattagaacaagaaaaatcaagaagaggctataaagaaggtatggagcaagatatattggtgccgtgggttttagctcaaaagggtaagaaaaagaaagatataaaagaagaagaagaaaaagaagtagctaatgttgaaaaacctccagttaagatgagattttatcatttatacaagaatggcgaattaattgataattgtattaaggcaggagggaaggtagtgaaagacggttatgaaagagataattggtgggtaattgttgagaaagaataaagcgatttatgtttatataataagtatttattttatttatttataagtaaagttatataggatagagttgtataatgaatgactatacattttcaactgaattgacattattattgttattattattgtaatttaacattgcattacgtctttcaattctaccctttttcattaaatttttcaaagtaacactatctaaaggatctaataattcaaatgaacataataattcttcacttacacccataactgcaccccaattatcgaactctccacagtagttcggagctgaaaaaattgtaaccaatgatctatcattgaaaaattcataaccatcctcaacgaccatatgagctctaacaactaaatcaaattgaaatttatttaaaaaattattaattgcaactttattaaaacaatatgaaacaccacgttcattatcttcccattgatttggtgaatctgctggatctgaccactaataaatcatttaataaaccaaaatcggggacatctgttggtcttctaatatttctaatttcatccattgaattaagaactggtgataaacctccatgaacacaaaagattttaccaacaactaatgcagcaactggtaatgtattaaaagtatcaacaaataatttccaagttttcaaatttgtacgtctcttacattcatcataaaaaccatattgtcttgtaatttgtgcacattcatgattacctcttagaagaaagaaattttcagggaatttaatcttataacataataataataaaatagtttctaatgattgtttacctctatcaacataatcacctaaaaataaataatttgaagccggtgggaaaccacatttagagaaaattctaattaagtcagtatattgaccatgtacatcaccaacaattttaacaggtgcacttaattcaagtaatgttggttgacttaagaaaatttctctggcgactgcacaaaccatcgcaatttctgaatttttcaaacaaacagattttgtcctcttagcagaataacctgcatctaataatctttgaataaaatcttctatattaatattatatcttttcctataatctgaataaggtaattgttcattatttattgtaacattattttcatttactgtaagtaaattgtcattatttatagtattgttatcagtgatattgttattaatattgttatcattattaatgttgtaagtattattgggtatatttaaattattcggagattcattattcaaatgagtattttgaatttgattatattgattctcatcctctgtatttatagttggtatgatttgatcatttttcaattgatcatttgaatcattataagatatataatcgtcatttctattgttagtagcatcagatgattcaaagggggttttaactctacttgaaacagatgatcgacgactagtatgattagatatactattattgttagttatatgattaacgtttgatatatttgaatcattattaccgtctattataatattattatcaagtaatttatcacttatatttgaattataagaatttgaaaatgaatttgtaattggtgaactatttatatgtaaattattgaaatcttcaattggtataccatgagaacttgatctattacttctactattactgtttttactatttgatgaattaacagtatttgttgaatttcttcttgaaactgaattaaagttcgaattagagttagaattagaatttgtatatgaattatccttactactatgatgaattgaattatccttaattgaagttgatgaattcatccttaaaattggagatcttggttttactattgccattgaaggggggagttttatattgttattagaatttgagttattattattttgtgaattttcaatatttgaataagaatatgaacgagaatgtttataaattgtattaatattattgttgttgtctaatgtattattggtatcattatcgttagaatgattagtatcattgttattatattctgtatcataaatataatcataatgagatgttgaatcatgattatggttatggttatggttatgatctatatgattatgattatttgtgttgtcatcattatcattattattatagttattattattattattattatcattatactttgaagacgatttatttgatttattagatttattggatttaattgatttattagaaataaaagaattacgcctactgttattatctaatagcttattactagtattatttgtgtcatcattatttattttatcccttgaatttgaatttgagtttgaatttgaatgagttgataatctactctttaaagaacgagaagattttgaagaaccttgagtatcagaacgagtaaatgaagatttatttactggtttagaaccttcattacccattactaattgattaacagagaattgcccagtggaaatggaagtaaagccaagtaaatcacaaaagaaaaggctggtatttaataatactaataatattaatatcctgacactcctcccgtataccttcgcctttgtttaaaagagggtcattttctattattatattatctccgagaattttttaagttatctccatattacgtaatatcaaattatatccaattacgtaatacagcgtcgatgcgactattatattttgaggtcgatgcgactaccattttaaaaaaataaattaaaaaaaatttctgacttctcccaatctcaatctcaatctcggagtatttaacaatagggtactatgtaattttaatttacaatacaaatttttcacttgttttattttagtgattcattattctgatcttttcagtaggttattccttttacattttcatttaatccacttcttttctctaaactccttgatctctaataatttaatctgtaattaatctatcttaatattattaatattcttaatattcttaatattcttatattacattaaattatctcaattaaagtaattaatctactctaatacctttttttgtaatttaattctaatccttcttatcaatatccagtcataatcaatcacaatcataatcatataatataataaaataaaatgtgtggtatattagctattatatcttctgattcaaacgttaatgttgcaagtgaattatttgatggttcattatatttacaacatagaggtcaagatgctgcaggtattgtcacttgtggtcgtggtggtagattatatcaatgtaaaggtaatggtatggctagagatgttttcactcaagatagaatgagtaaattagttggtaatatgggtattgctcatttaagatatccaactgctggttcaagttcaaatagtgaagctcaacctttttatgttaatgcaccttatggtatttcattaggtcataatggtaatttaacaaatggtgatgaattgaaaaaatatatggatgaagtagttcatcgtcatattaatactgatagtgattctgaattattattaaatttatttgcagctgaattagcaacttatgataaatcaagagttaatgaaaatgatatatttaaagctttagaaggtgttttcaataaagttaaaggtggttatgcttgtactgcaatgttatcaggttatggtataataggttttagagatccaaatggtattagacctttattaattggtgaaagattaaaagatgatggtatgagagattatatgattgcttcagaatctgttgtacttaaagctcatggttatcaagtttatagagatattttaccaggtgaagcagttattattaataaaactgatttaaaaccagttttcaaacaagttgtaccagctaaaacttatactccagatattttcgaatatgtttattttgcaagacctgattcagtccttgatggtatatccgtctatagatcaagattattaatgggtgaaaaattagcttcaaatattactaattattataaatcattaaataaaaatgttttagatgaaattgatgttgttatacctgtacctgatacttcaagacattcagctttacaatgtgcaatttcacttaatataccatatagagaaggttttattaaaaatagatatgttggtagaacttttattatgccagatcaaaagcaaagacaatcaagtgttagaagaaaattaaatgcaatggcatctgaattttatggtaaatctgttcttttagttgatgattcaattgtacgtggtacaacatcacaagaaattgttaatatggcaagagaggcaggtgcaaagaaagtttattttgcttcatgttcacctgttattagatataatcatatttatggtattgatttagcagataataaacaattagttggttataatagaagtgaaattgaaatttcaaataaaattggtgcagattatgtcttttatcaaaatttaaatgatttaattgaatgttgtcaaagagatgaattattaaaagatcgtgaagttgaattagctttaacaccagttgtttcaagagatgatacaattaaatcattaattcaaagagacgttgaaattcctccaattacaggttttgaagttggtgttttcactggtgaatatgttacaggtgatgaatcacaatatatgcaaagagctgagagtgtacgtgctgcaaatgctcgttcaaactcaactgcatcaatggatataattgatgttaaggcaccttctgaaattaacatgttaaatgaaggtgattattgaaaaaaaaaagaaaaagaaaacttaaaaaagtatatacactactactatatagattcataataatatctactgattaatatctaaattatcttcaattactttcatagcggcaattgcacctgcatctttcttacttggaccaattccaatacttgtaattttatcacctaatgttaattttgcctcaaatttaccattacctaattgtttaaatgtatatttgggcacaatattatattttgaattataatatgcataaactttttcctttgcagttgataattgaatcattggttttcgtattggtgtattagaaattgatgaattaattggtgatgttattatattattatttattgatgatggaattggtgatccaatattagaaattggtgatccactattattattgataatattattaatatcattatcattcatattttgatcaaatgagaaattagtttcattaatatcatttacaataaatcttggatcaagtattaatttttgttttataattgatttattatttaaatattttttattccaatgttcattatatgaacggcgaatatatttaataaatgatgggtcaattgctgcaattaatgcacaacctgatttagctaattttttattcattgcctttgaatatgagaattcaactttatcaattaataaatgacatgaaaaataacccgttttcaaatcagggtattcatcaattttatatgttaaatcaatagttgcaattttcgattgattaatatcttgttgaactgattggattaattcttgtaagttaatatcatcaggaattggacctgaaccagtttgaacagtttcaactgaatgatgattagtatctttttcctttattataggttgatgatgttgttgttgttgttgtgatggtaacggctcatgaattttaggttcttccttttcaattggtgatctattgatatttgaataccccaataaattctccaaccaatcaaataatagattccaatgttcattagatgattgtgatgggttagcaaggtaagtttcatgataaataccgaaaaatgcaagaaataatttatatgaaggtatttgtaaaccaataaacttataattaaattctaaattataagcttgacaaagtatattaagagaatgttcatttaaaaatgaaggtaaagtgatattatattctgatagtggttgattatttttcaacaagatagattcaactgcatatcttaaaattgaagcacctaatgattgatattttaagaaactttctggattattaccattaattattaaatttggagataatttatctattggtaaattaagaaatggagggaataaattaaacatataaggagctggccaattatatagatatggatcagtaaatgacattgttggtaatgttgatttaggtaaatatagtaatgaattgcggaaatcttgatcattcatatattttgaacaaaatgcaaaggcagctgatactgaagggtcattaaaatctgcattaatatatgaattagggttaagaatgagatccaatgcagaatgtaaagagttcaaagctgcaggtacgggttgattgagtgggatagaagggttattagtgtccattgagtgtgattagtcaatagaatagaatgtcttgtaaaagaagaaacagtcctttaagatggtaaacagccaaagacctgactgagaatttagcaacacttcccgcactttgaatttttttgttaagagaaaaaaaaattttttttcagttgttagttatacctgtactggtaaaaggaagttatatttgacttatatttcaagtggtagaaaaacacacataacacagtaccatggcaaagaagatcatatcagaggaagtcattgtagactccgacgatggattaagtgacagtgacactgaacgtcaacttgaatccaatgcagttgcattcactgtaccacgtaaatatacaaaggaaactaaatttcacactccaaaggatttgaaaaatttaggtaaaaaggatcaagtatggttaattaaagtgcccaaagatgttgatattaaatctttagataatatttcagttgatgatgattttgaaattaatggaaggacatataattcagaaattgaaaatgttggtgaaaaatttcaaattttaactccaaatgatgatactttaagatataatggtttacatgtatcaaaaatgttaaatattagtgaatttgttaaaattccagaaattaattatgatgcagttagagtacatagagtcgatgttgaaaaggaaaccgatttagaaatgcgtcattttccaactggttacggtagaaaagatttcatcaaggaaggacgtgtagaaaagaagaaacatagagaagaaaaacctgaaaagaaggaaaagaaagacaaaaaggataaaaaggataagaaggaaaagaaggaaaagaaagataaaaaggaaaagaaagaaaagaattaatcaatgatattttttctaattgtacaatcatcataatcatcataataatcatttaaatcacatttacatataacacataaaattagatataattttaataaactataatatactatattgttgtaaatatatacacaagcacacacccaaaactattatttaagtttaccagaataatctttaagaatacctttcatatggatatttgtaatcttaccacgacgagttttcttttgtttacgttccttaactgatgtaatcttcttacgacgcatactctcaggttcagcattcgtcggagtaagtccattatctacaagtaatttaactaaatcatcatgtgcaggtattgaaactgaatcccaaagtttcttaactgatgcaggacaacccatctctaatctatccttatttaaccaaacatgtcttgcagaattatccttcttcgtacgatgaactattatataatgatctctctctaattcatcaatagtttctatacatttactccatccatcctttaattgtttaactgatatacctgcaaatgctggttgattctctaaaactcgtacaagatctgctccagttttaatattatgaagtgataaatattgaaatttaccatctttatattgaattctatcaacatttgataaacattttaataatggtgcatcaactgttatctttaatgctttctctaattcatttactgaaactggtccattatgtgatttaatataatcagatgaggtcatcaatctcatcgtaagattagatgaattggttggtctattactagaattagttggacgttccagttgtaatctcttagcaggctgttcaatgtcttcatctgatggtttctttaattcatttgtactgttattcactactggtttcttctcaacttcagtttcaggtgttttatcctgtattttagcagcttttgatgtgtctgttggttgtaaagttttcctgaatgctgataattgtgctgcaaagggatccgacatgttttggttgtatgagcaatggtatataccttttgaaaacaagataaatatacaaataaagtacaagttacaaccgactataaaattaataattttttaagattttcatgtcacctgcaatttttcactcggacactggcacaacgtccatttcatgaatgagtggatttctttcaatcttcttcttttctcttctcttgtaacatcctcttctttctaacgaacactatcggaaatggcttccattattgcaaaacgttttgctggacttgctgttagagcttcaagagtttctcgttccgagcttaactttgaaacctttaacttcattaagggcatattctcaaaaaccacttcttgatgatgacctacttgcaaaggcaggtgttgatactgacactccaccaaagaaagaatcttcatcacatgaaaaagaacctgcaaaagatgaatttgaacaaactaaatctcgtaagaataatacaaaatcaactattgataaaaagaaagaattttattcaagactcttttggtacagtttcttagctgcaaatcttggtttccttggttatatggctagagattatgataaggatgaagaacctgaactttatgttgaatctgaaaatggtatgtctccatcacttatctataaaagattaaagaaaagaattttaggtgtctctgatgttttctctgaacctgcatttactgatttattaccacctcaagcaaccaggtcaatatgctcctccttacactcttgttttagaattagatgatatgcttgttcacttctgcttgggattataaaaaaggttggaaaactgcaaagagaccaggtcttgattatttcttaggttatttatctcaatattatgaaattgttgtcttttcacgttcatctatggcatttgctgaaaactactgttgctaaattagatccttatcatgcattcatttcttattcactttataaagaagtttgtcgttcaaaagatggtaaattaattaaagatttaagtttacttaatagagatttaagtaaagttattattattgatccagatcaagattgttattcaatgcaaccagaaaatgcaattccagttaataaatgggaaggtcaaaaggataatggtttaattgaacttatcccatttttagaatatttagcaacttctcatactaaagatgttagaaatgttcttaattcatacaatgataaatctaaaattccacaagaatttgcaattaaggaacatcaaatgcgtgaagaatggaaagaatctcaagaacgtaagaaatcaaatgatatattttcaacacttcttggtattccaccttcattaagaggtgcaaagaaaatgccacttgatttaattcgtgaacaaggtcaaagaaattatcttcatatgtataattacttaaaggaaaatggtgaaaaattattaaaggaagaacaagaaaagactaaagaactgatggctgatcaaaaattaactcttggtaaaattgtcaatgaaggtatgccaactgctgaagatattgcaaaggctgctgctgaaaaggaagcaagagatgctcaaaaataatttagttaatttttgattatttaaatcatcacatttatttctctgtgtaatactttctgtaaatattaatacatactatactatacttcaaaagcaatttctatctatagaacggagaatatatccgagttgttcagattcagtattcttagttattttatatgatatttgaaaatagtcacttcaacacaacaaataatgtccattcttcattaccaatcattatcataaccactaactgcagcacttagaccaatgatagttcgtcctacctaacatcactcttaagtgtatctatcaatacatgctccaatctaaaactcttcattccatgataatcagttagtctaaaaattgcaacttgtccaaattgagtggcatatgctattgcattaatagatttcatatgaacaacaagataaattctattaaggaatgatggcattctcgatggcgtatctctaatatcaaattctaatccaaattcacgatcatattcggaacatttagcagatccacttcttctaataatatccggtcttccaacaatagggaaaacatcaatacatgaactaatattgagtaagtgatcaaactgtgaataatccagcattacacttggttgatgctaaaatatatttctgtttcttaatcttggtaaaataactatcttgaatattatttttatatctcaactcagaggcgtatatttcatcataaaatcttcttctccttgcaacttgttccgtccaatcagattacaattgggttcttatggaaaaacttcatcaatttcaaattttgaacatttgtgtgattcattaaagcaccaattcctaaactatcgttttcaggttcatgatgtaataacctactttgtattgcaattttattaacatcgattacatatttactaaattctccacacaattcagtaacggaatgaactttcagaaaatcttcatcttcaagaatcaaacatgaccaagcagctgaattaagtgcagtattatcaataataacaaattcatcattgacaaatttaaaggtaaaaagtgtatgtttgtatgtaacacatgaaattaaaatttcatttaagttttcatcgaattttgcatctaaatatggtatattatgatttaatttaactgatttaatatgtattattctaccatctttttcataaaaagcatgtagtttcatttcattatttgaagcaaaaacaatattattgcaaactttaacacaccaaacagaatcattggtacgaagatatttatcaataaaggaacctttgaattgataaatgaaatcattcatcaattcttcattataaacatgaaagaaaaggccgtctttattttcttttcgcctttgattaacatccgtaggtatttcaaagttgggatcactaattgccgcaattaactcatccatctctaacactataacttctttattatcattccctactaccagacaatattttaattcatcattatcatttttgaaagtttcaactccgagataattaattatataagccatataatcttcatccgattctaaaaaatcatgggtgtcttcaagatgtacctctccaacacgtatttcgtctatatcactatgataattagaaacatcataaaattcaacaatatgatcccttgcaactataagtaatttcaatccatcatgaaaataagttgctgataaattacttctatgaacgtttggatgtacacgaaaccttgtatgacgcatggttaaactttcaactttcaacgtagtttctctcggatatctaccagaaggttgattatatactgcgaacattggattgaatgattcaattattgagtcatcagcttcagtgtataaaccttttcctaaaccttcatttctatcaaaatttctaagtgcatctaccttattcattgctataccaaaatcactctctgttgatgttattggtaattggaaatgtcgaagaggatcaaatgttgttttgtcatcactatatgcatactgcctatatatatttagcggtttgatatttgtgttagttattatgttgtttgtaagaacataattgatgttggtattgatattttggaaaaattgatcagggtgtactttctccaaaaaaatattttcatacttatcattgtttttgcttttacttcgttgtttcgacactctgatactttggatcatttcaatgtattctgaagttactttcaattctgtggaatcaaatccattgaaatccatttctttatctaattctaatttacgaggttgggaaagtgcattttcgtgaacaaatgatatactttgttcgttcaattctgatagttcctcttcatattcatcatcctcatattcttcatctatatcatcttcctcatctgtattatcatcttcttcaatgttatcattttcatccatatgatcatcttcgtgatccccttcactgtattctaacaaattcttattttgcccattgcccgtccaaggttgtaatctttcactggatcgaccaattgttgctaaatattgttcaaaccagatatcatggatgatgtcattcttttctatcacatccggtgttgaatccgttggaatagacattatattgggtaattgatcaataaatcacctctataaacaccaaataaatcggaataaaatttacttcatgttgtgcgccgtaaaaacttacaaaacccgcacttttaatgctccctcttctcacccaacttctgaaaaaagtataaatggacagcttttcccactttttttgacatttcccttagaccacctcctgctttccctcttgatttctttcctttatcagcttgagatgattgcctgaataaaggaatctgtgttatatctcgctcttggtcccatgaggcctggtctataaagacaataccctactaaggaagaattagaatttgccacaaggcacgccgtcaggcagaattgatctacgttagcaatgaaaagctggagaagcataataaaagtaactagataaggatggctctaggtgacgcacagaaagctctctagggtcagtaccgatacataacagtcgacaatagtcgtatagaagaagcagcttttcatattcgaaaggattaaaatgtttatggaatagcctattctaacatcagggccaacattgtattgaaatgaaatactttcagtatagtgtatagctgtaaaaaccggaaataatgtgaggaataacttattttccagaggtttgattatcatccactgaaactcggtttccaaaacaagagtttttataatggtttaatccatttttctctttttcaaaaaatattcatttatagtcagttgactatgttgtttatttgattagatacaactgtttatatacattaaattgctactctaacttttttaccaacaactgtatatcttgagactatgaataagatggatgctaatgcacatgttgatgctgcaaacgctaccatattatcataatcatgagcagttctattaacgatgaaagaaccagatattggtaatgaaattaaattaccaaatgaaacaattgcataagcagatccgtatcttttaccaaaatcttttgttttagttgtgattgtaccaactgttgcaccagttaatgaataagttgccgcatatgcaaatccaaataatacaataaatgtatataatgcacctttatatttaccaaatggtaaccaaataacgaaacattcaattgacattgaaactgacatcaaaatcatcatattaaaacaaccatatttttgtgcaaaatatgaaggtataaacttaccaaaagtacctgagatattcaaaactgtaatcattaaataactttcagaagctgttgcgccgtgggcaattgcataagatgcaatataggttaaaacaattaaaagtgaaaattcgttcataaataaagcagctgttaatgtcataaattttttatctttaaaagcagttaagtccattgaactctttaatttttcccaaaatgatctatcgtcataaggttcatttgttaactcatgtaattcttttaatctatcttgagttaaaactgttgcgactaatgtaacacctaggttgaataatgcaaatatacgcattgcccaagtgaatccatatttatcaaataaatatcttaataagattggaaaaaagataccaccaactgaaccaccagtttgaacaacaccaatatagaaagatctttcagttctattaaaccaacatgaaataactgagattgcagggaacattaaaaacccagtaccaataccagtacataaaccaaaacttaaaataaattgataaatctcagttgctgaaccacaagcaaataatccaacaaatgtaaaaatactacctgtaagtaacaaataagttgcaccaaaagtatcatataaaggaccaactaataaaccgaggaaaagtgaaacaaacatataaattgagaaaacccaagaaactgcagagactgaatcatctgctaattgattgatttgaacatatgattcaattgcaccaattgcattcataataccgaataatgtgaaacatgctaagaaactacccaaaacaacaaatttagatttccatcccttagggtacaatgcatcatcatcaatatgttcatgttcattattgttgttatttgaaccttctgaaattgttgcatcaaatggattctcttcaattgtacgatcacctaattcataaccagtttcattaattacatctgtatcatcttttgatttgtaaacaatctcactatattttctccttgacaggagaaccatcattgaatgacttcaattttgtctttaaatgaactttagggatatcattatcaatttgtgatttggataatgtctttgtatcatcatcaagtaatggaggagaactttttcctggaggatgatgttgagtttttacgaggtaatgcagagggatcaacctcaccaatggtaggattaaacatatttcaaccgttaattgaaaaatctctaaaagaaacatgcatattacaattatgtccaactgttgcaatataaataattatcgatcttttaatccattcaattgataagaaacatacttttttttttcaaatttgataatacggcccgtcgtgtgtatgtatgaccatattaggtaataatacatccggcgttttccttgatttcaggggttgtacatcttcttctgttcacgacgatgtacactctcttcctcctcattccatcccatacctcgtaaaagtgcaaatccaaaatcatttacaggaacttccttgtaactatcctcattaggtggttctgctcctataatgttatcgatattactgttctctgcatcacttatatcttctgcaccagccgctttttcctctgtttgaatttggcggctgaagaactgcgccaccttcgattgagacattggaggtggcggtgtaatgatcagcttagtagctggttcaacaggtgtagtttgttgtatctttagatgtattaatgtctgcgatgttggatatggagatgtctgcagttgtagtatcgtctactatcttcttctccatctttcaaagcgttgatttcagtttttttaatggatgtattttgtttctttttggattttagtgaaaatttacctagctttttaacctttagcttagttataccaccatcttgaacagactccatactagtcgttacgctgagatgtttagtgatatactgtgtagtacaatagaaaatgttaaaatacacgttagaataaagcctttaaagatagaaacagtgtaaaaaaatatagtcgttcagctgcgggtttgttaatggtaaatcaaggcaaaacgaccaggactttgagattaagctttgtgtatattgctattataccaatcagtatgtacttgagaaggtttgtattgtataaaagtaaccttcaattggtaaaggggatatttattaaaccttattccacaataaaacaaagtgatataaatcaatcgaagaaagttgattcatctgatgatgttcaacaaagattatctaaaatactgcaagatataccacaaagtgatagattagagaaaaaagaaattgattatgtgttgaataacagtaaacctgtctctgaagagtctgacaatgtctcaacggaggaaagtaaacaaaataaaaatgcagaacaaatgagcaataaaagcaatcaaaacaaaagcaacgataacaaacaaacttattcctatgctgatatcttcaacattcaacaaataatagatacagtgaaagctagtgaaaatgttaagttgcttcaaactgaacttagtgaattctatgcaaataaacgtaaaactcaaaaagaattaaacgaaacactaagtaaaacaataagtcataatgttaaagaactgaaaagttcaattggaattgcttctaaagttgttaatgaaattacaggctataataaagttatcaagttgaaagatgttattgatgagcatgacaataagttaaaagaactaaagaaggaaattcatgcagctaaagctaaacatgaaagatctttagaacttagatcttcatctcaaaaagaagtcaacgagttacttgaaagaaaaaatagttggactccagttgatttggagagatttaccaaaatttatttaacaacacatgatttagataaaagtgttaaagattcatctaaaagattaaatgatttagagaaattacaagaaacaacgcatgataacttgattaaatcaattatgaatagatatcatgaagaacaaatttggtctgataaaattagacaattctcaacttggggtacaatattgattatgtgcatcaatttagttcttattcttcttgttcaatttgtgtttgagccttttaaaagatggagattggttaactcatttgaaggtaaggttaaagaattgttttctaatagtgaaaaacttgatcttgatattcaagagttgagaaatgaactaacagctctgaatagtggaattaagttatcaaatggtaataagaatgataataaaaataataaatatatgagtaatgaatcacaagtaataataccatcaccaataataaatgatgttgtttcttatgaaccaccataccagcttaagaaagctgacttacaaccattccaaataagttcagctgaatctatcaaattatacacaaattattatcttaaatctgcatatctatggtatgactactctaaattttgggccggtgtcaatttacaaaagatcaaatcgaaaatacaccactcgttattttatgttacaactccatctaatagtggtatggtaacaagttctgtcggagatttgaaatttggtctgattataagtagtgttttatctgcattaataggtttgcttgttggaattactgtataaactaatataatgtatatggctaatgatataatgatgtaataatataatgtaatgaattgtaatgtaatgaactaagagtaacagagctctctagggttcactcacagtaagtcaacctgaaaatctgccccagtgagtatttcttaacgaattccacaatttttgaatttcaccatgtcggtggcaaaaggcttctttcttttaactatcacagataccctatacatcacatacatacagctatggaggaattaggaattgtaccaccaagtgaacaaccacataatcaaattgataaacatacattaaaatcagcaaatgggaatttaaatggaaattttggaatttctaatgaatcatccaataatgatgtttatttaaaattgaagaaacttgaaaaagacttagaattaattaaattacaagaagaatatatcaaagatgaacaaagatatcttaaaagagaactggttagagcacaggaagaagttaaaaaaattcaatcagtcccattagttattggacaatttcttgaaccaattgatcaaaatactggtattgtatcatcaacgacgggatctaactatgttgttagaatattatcaacattagatagagaattattgaaatcagcagcatctgttgcattacatcgtcattcaaatgctttagttgatattttaccacctgaagctgattcatcaatttcaattgttggtgataatgaaaaaccagatgttacatataatgatgttggtggtttagatatgcaaaaacaagaaattaaggaagctgttgaattaccattagttcaagcagatctatataaacaaattggtattgatcctccaagaggtgttcttttatatggacctccaggtacaggtaaaactatgttagttaaagctgttgcaaatagttcaacctgcagcatttatcagaattaatggttctgaattcgttcaaaagtatttaggtgaaggtccaagaatggttagagatgttttcagattagcaagagagaatgcaccatcaattattttcattgatgaagttgatgcaattgcaactaaaagatttgatgcccaaacaggtgcagatagagaagttcaaagaattttaatcgaattattaacacaaatggatgggttcgatcaagcaactaatgtcaaagttattatggcaactaatagagctgatacaattgatcctgcattattaagacctggtagattagatagaaaaattgaattccctaatctaaaagatagaagagaaagacgaatgattttcagtacaattgcatcaaaaatgtctcttgctcctgaagctgatttagattctttaataatgagaaatgatccattaagtggtgcaattattgctgcaattatgcaagatgcaggtttaagagctgtaagaaagaatagatatatgattatacagagtgatttagaagaagcatataccgcacaagttaaatcaggaagtgaagttgataaatttgatttctataaatagttttattagtctaaagatttatataaagaacatagttaattcaaattaattacactcataatagtaatttataaattccaatacctggtgtgaatgtctctataccgtataaatcatattcaaaatgatccatatctaaatgccatgaatattcccataatggttcataaagattactatcaatattaagcattgcaccaattggtgcaattaataaaacttcatcattgttttcgatttttttaatttgtttgtaagcagattcaactgtagaaactggagatccctttaatgtgataatacgattttgatcgatttttggaatcgtaattgtatcaagattatcgattctctcaatatatgcaacatctgataatttttcactttcaatcatccaagtaggtggtggataagttctccaaaaaatcaaattaacatttgcttcaaaatcactgtatttatccaatatggtatcatttagtttaatcaatgaaggtacaatacctgtcctgatggaccaatccataaaatattgacatgattgatgtgtaaataatccataatgtaagagcatatttactagtattttgacaaaattttagaatctggatttgaaaaattgatgatacttgaaagtaatggtactgcaggtaataaaaagcgtaattcttgatgtgggaatattgaaagaatgataaagcctgaaattatcgataaaaatgtagttgttttagtatatgagaaattaaatgggaagattaaaaatattaaaggaccaaccatttgtggataatttatcaatatatgagttattcttgaatgaattccatgttgttgtaaatttgatgtagacatgttgtaccataagttgttcaatggtgcaattgttattgttggatatgtttcataatataatgtatcaatgtaaataattaaagaacatgaaatgatgaaagagacgattggaataaacgaacgtattggatatttaaggaagaatttgagtaaaaagaatgatgggaatagaatccatgcaataaaagtaattctattgaatgtaccaaaagaaattaagaatcctaaaactattaacttagtggaactataagagggtattgttttctctgttttctctgtattgacttgctcaagatatgatcttatatcatttataatgtataatgtaggtaacaaaacaagagtttcagttgagtttgaaaaagtgtgtgattgatgaaccagtgttaaatatgaagtaactgtgaataatgtagccttaatacgttcatgttttatcggtattaatctgtataaacaccaatcagtaattaaccatgaaaaaattgttaattgaaattttaccaataccaaaatttgaaatggagttaatgaataatacttaccaaataaaatcattgggaaatgtgtgaacaataatgggaagatagatctattgatatttgatttttctagtacttcccatggtaaattgttattgtagatgatctggaaagattggaaaaactcatcagggtgaagataagataattggttggatagaagtagtctagctactgttccaactactattaagttcctccagcttccactcatactaatcatatgaagtctgttaataaaaaaaagagattgaaaacggtgataatttattacgattgtaaaactgattattcatgcacgatgtcaatcaagtttcaaaaaaaaatatttttacaagtctacacttaaaagtttagtatacacatgtcttcactattttaatattatcaagtcagaagtttgattgtacaataatagaagaaaaaagttatatagaaggtaacttataaagaaacaagatgcatatcaaacgataacagtatttataattaacgaaaatgttaagtttgtggtaaatttatgaaaattttataatttttttttaataatttgtttagttatgtagtaaatgcaaatataaaagttcgaagagatataactcattcgataaatgcagaaacttatataaagtttttaagtttgtttggtatcaaaataatttttgtatttaaattaaagtggatgattaaaaacatcacacttaacattcgactaagtcgataacgtttaagtaaacagggacacattgttcaccaattgattcatcgtataagttgtagaatgaaccggataaacattcccagaagatatcatcaccacctaaagttaagtgaccaccttcaataccccaaccagcagcatagattgcaccagcttgaggagttggaccatcaaattgaaattgtctgtttgaaacaatagaaccaattctatcgtgagaatcctttaagacaccatttgctaaagtaattgctaaatcgttatcagtcttacaggttgcctttgaagcaattggaccagctggacaatcagaagcagttggtttagcggaagttgaaactgatgaaagagatctgtagtggaatgatgatgatgaggtaattggagcaacggtggtaacagtagtactcttacccttggtaacagtaacataaacggtttcagtaacttgagcagttgggtttggagcttgaatttgaccatcagtaatttgagtaacaacaacatccgggtggttacctggctttgcaataactgaagagcctgtagtgtgaacaaagacggtttccttttcagtaatagtagtatcttggaaagttgcagtagtaacttgaatttgaccatcttcaatttgagaagctaaacctctcttagccttaatgttaacagcagaggtaatggtgtgaatagcaataccaaaagattgggtatattcagtgacagcacaagatggaacagctgcatctggggttaaagttgaccatggttcagatggaacgtaagctgcaatagcagatgaaacaagagttaaaagtgataaagagaatttcatttttagatatattttaattttgttgtttgttatttaaaagaatgtataaacagttggagtatatgaaacgaatgacaacaagtgttagtttggttatttaaaaatgagtgattggactgaagaaggaaacaaaatcaaaagaaattaaataaataatacttaagaggaataagtacaagaggccaagaatgaaaataaaggaaagaatgggaataccttcaatatttaaacgattcgacaagataatttgcacagaagtggaatagagtagaaaagagtggaatagacctcataaggtgatattcataataacaaatcaaatgtaaccataataaataacaatacggaaaggtaaacaacgcgctaattgatactcggtcctttagaaacgtttgttgaccttttgctgttttcagcggcgcgtttgttttcttattgtctatttattactaagaactgacaaataacattggttatgtcatcttggagttaaggctattattattattattattattattattatttttgtattgtttatatacggtgttggtattgcaaatgaatagacaaacttataaaaataaactgagctatatctgattacataattaactcacttcaatctgattctgagtctgagtctgatcctgaatctgaggctgagtctgagtctgagtctgagtctgagtttgattctgattctgatcctgatgatgaaccggattctgatcctgattcctctgaagttgtattatcatagtactcctctctctttaatgctaacattgcagccttttgtgatgacatacgtttattcttatccagaccatatgcaacaatttgtttatttccaaaccataattcacataggaaatctccactaatagttttataactaatatatccaggtgcacctccacgtttggcgaagagagcatttaattggttcttactatccatatcaatttcatcacatttttctagaacttcatgacatctaagtttaattatttctgaactattacttccatcatgtgtctcttcgaaaatctcaaaaacacaattacgactaatacctcctcttctcttagcagttcccttcagaattctaccatattcttcagcaaaaataccacctctacccatggtatactctttactatagtatttactggaagtatccttagatttctttgctgatactggtggtgtacttgttgcagaattgctatttttaccattggagccatcttcaatcaattcacctgatgtattttctaatgaatgtttagattcaagttctttcctttgcaatttcacgttccttatcaccaatcaataatgaaattggattattctttgaagccaataatttaatattaccattcttatatttcaaagcaatttccttctttaataattccatatcatgattactaactttagttgggaattgttcgaaatttaaagcacctgtactgtcaagtccaacactatcttcaaacttcttccaaacatcatcagggcaaatcttacgaatacctggattggctaatgcatcagttgcagctcttgaatcggcttccttattacttgtaccaataccataaccgtaaactttatgagatattttaacgcatgataagaatcttctattaccgatattacatctaacatagtctggaatattattaataccaattaataatcttaaatcttgtttggaggatttagaatattgcattttgaaaacaatacttggatcaaataatctaatttcttcttcacataattcttcaatccaattctttgcattaaaccaacctttcataaaatcaccaacattggtctcaccttccatagattccatcatttgctcctcggcaattgcacctaagtaagcttcaaagacatctgcatacatcttattgttcaaaacagatgaatcattaaagttctttctgagttgtttatcaaaaccatataattgtgaaaacttcaataatttagtatttgaaaccagtttacttctaagaattgataattgaccttcactaaaggttgggaatctttcataaataatcattgatgtaataaattgtaagaatgcatcacccaaaaattcaattctttcattgtgtgagttaactttgctttcttcaggaatatttaagttacttaaaactgaagagtgtgtaaatacctttgcaatcaattccttattatgaacttcaggtaattctggaagtttatcttccttgaaaatttcaaacttacgatttcttttgtaaatattatcatctgtgttgttattatctgagatattgaaacgaacaacagatgatgtgaaaacttcactcatatttgcttcttcgtcatcttcttctttctttatctcttcattattgatattatcattatctacgttttccttctctttcgtcttttcagtatcttccttttcattattttcattggtatgttgattttcatcattgagaatactttgttcaggagcaactccatccctgacagtatctacattatcagagctggagctgttcttcaacttagtatcatcaacaacgtgattctcaacatttttactcttagatttcaatttttcaaaattttcaaaatctttgttaattaaagatttaaacatttccagatcaccattatcatataattctttcaaaaaaactgcaaatctgatattatcacttttcaaatcaatatctttaccattttgttttaataaacctttaataaatgggttatccaatgattccaataatgagccatataacttcctatcaggtgctaactctacaatcttctcaaatccctgacagatttgtgtcacagcatcttcgagagtgacaaacacgtcaatactatcagccatgctatctcaaagtctacggaaaggaaaccctttcaaaacaaaaaaagaattaatttccaactatataccagaccagccaatctaccgcttaatggccaactggaaacaaaaaaagaaatttcaattttcccacttcgaggaggctcgtcattttatttgatgttttttacgttatttattacacagttctttctaaagtatacaagttgtagttagtcaagccatgcttctttaggattacctagcaaacctggcagttagtgtagtgtgcatgtctgggaaagtatcagttttacccaatactaaattctgtccgttgaatttcaatttaatatatccagagaatacaacatctgcaactagatttctaacgtattcatcaacattatcattatttaaattagatgtaaattgataagtaattggtaatgtatccattccctgtaatgcatttaacaatgatagccttatcatggcccatgataatgtaccgttttgtaatttccatgttttcaatagtaaatttcgtaataataatacacgagttttttgtaatattggaatccataatctaatagatttccaaaaattttcatgttgataaataagtgaataaaatccataaagattaccttgcttaaaaatcttcaatattggttcgtagatatcaagtatcttatttaaggaatgatttgtattagatatatgacttcgtattaattgaatatttgcaattttaccctgtattaaaccgactgggatgaggtatttcaatatagttgtaattgcagatgatggacattttgataaacaaagagatttgaaacattcattcaaatgatggaaggatgaaataaaattggattgatgtgcatagtatttacccattataaatctaaatcttaataattttgactttttaattaatcttctattcaaatttaaaatattgacatttgagaaaacattggaacataggactggtgagcctattttataataaacatcacataaattagaagaaatatcaaaaagaagttgaatcttatcataattttcagcggtatttaaatctgctgttgatctaatattattcaatgattttaataatattgttgagacatatgtcaaccttggaaagtccatctctctgttatgaatttccattgacttagtgtcaattaaatgacttaattgaataaccaaatccattgattctttgaaattgtctaagaataatttagatattttatcgtatttattattatttttcgtattaagtaacattgattgacattctaaaactgaaataaataaatcaatagattttaaaattgaccatggatcaatgtctctaacaaaaagtaaatatttcaatatgaaaagttcaaatgcaggccattctattgatttaatagttggattattctgtattaattttgataattttttagaatcaaattgttgtaatgataattgaagttgagctattctttgtggattatatttcccaatatttaatgaaaaaaattcagtaaatgtataactctggtttctattggttaaaactgtagatagatcattccaaaactgatccaaagaatacaccatggacatcttcttgccctattaagatgatcagagttgggtcaattctgtatggcgtctcattggaaatgttgatgtgagcgaagtgcaatttttcaacgacactctgtagaagtagtcttatgtcttttcttgtagattgctaagtgtatataagtatcgcaatgtctgaggaaaagaaggatgtatctgcagatgcaaatgctcagaaacaaaagcaaagacaaaagcaaagacaaagacagagggaaaagcaaaaacagaagcaaaagttagaaaaagagaaagaacaagctaaggaccaagatccaaaaaatgaacaaaataatgtagaatctacatccacatctaaacctgtcaaatcgaacataccgaaaggtccaaagggtaaagtgaataacgaatcaaagaaaaatgttaaaaatgatgtgaaaaatgatggtaaagcagacattaaaatcgatgtaagaaaagcatttgatcctaaaagagaaccaaaatctaaatccaaaccgactgaagctaaaggtgaatgcaaccaaattggtccaaagtaaagatactagtgctgaaaatggtgaattaagtagaaaggaaagaaagaaattgaaattcaaacttaaacgtgcagctaatagacaagccaaacgtgaagctcagcgtgaagagaggaaacttgaacaattagcaaaaggttcaatcccagttttcaaaataacaattcgtaaattaccacctctattaaagaaggaaagttttatagaacaagtttctcgaacatatcctgattttaataaagatgttacgggtatttactatgtacaagggtatcatccggaagtacaatttgaggaaagtgttttaagtagatgttacattaattgtactaatcaagaaacaatgatgaaaagttggacgtgcaatcaaggggatgcaatttgcagatgatgatggtgatgaagaaatatacaatccaacgattgaaaaatcattttatcaagaaatgccagattttgaaaaaatagaaaataatgaaaatactgaaaatactgaaatcactactccaaatattccaaatactatcaaaatcgatgtttgggatgtgtttaataataaattagatgaagttgatgtgtataaaagattctgtgaaatcatatctgatgagaataagaaacagttaccatcagatatatttgcatatgctaaaaaatgtgatgcagcagctgcaaagaaagtacaagatgaagcaacagctaagaagcaagcagcaaagaaagcaatgaaggcagcaaagagagaaagaagacgtaagagaaaggcagaggagaaggcaaggaaaggcaaaggaaaggcaagaaaggcaaaaagtaataataaggcaaattagaaaaagggaattttattgctataattcacttcctcttctcttgttatcacatattcatctacagatttatctacaatggcaatcaacggtgtaggtgaagtgttagtagatgactttcgtcttggttttatccaactgactcttggtttagtaagtattgcaaatatatcaaaaacaataacgaccttcttttttcattgcatagcaattgatgtataatagataagtgaataaattgactaacactgtaaatcaaatttctaaatttaaaaatctttgttcattatagtttgaaaaacttaattttttagaacttgaaagcaatgatccaatttcaaaaatatttgaattcagttttttaaataaattttctgaacattatcttgacggtaaagaattcaaggaacttgatgatatgggtaatttacattatgttgaaagatttttaaataatgttaaacaaaaatatgaaaaatggtatcaattaagtcatcaaaatgattcaaataaaagtttatgtgcagacccatcaagtacaacaactaatgaaactgatgttttactattaagcccacatatgagtacattaagtgacttgttaaccagaacacaagtttcgttactcaaaaattgggttcaaccaaccaaaaatgatacagtaagaggttttggtaattttatcaggtaaagttatggatgcagttatggatgatgatattggtaatagttttagtaaaatgaaaatgagaggattaattgatctaattgaacaattacatctcttcgtgtcgatcttgttactaattgctgcaacttgtaaatcgtcaactttagtagtttatgaagtaaaacaattagatcaaaattcaatttcaatacttaaaaaatggtgtaaaataaataaaatttcatttggattcgtatttgatgattcaattgttattaatgaaaatcaaaattataatgatagtgttagtgatattgtttacaacaatgaaattaaaaaattaaaattagagattttaaaattaaagaataataatgaagaagttaatattaaaaatgaaatgcttaatgatcaagttaataaaatgtgtgttgaaaccaaagttgagaaattcagattaggatctgatattgaggatggactgagagctgaatttgagaataaactcaaggctgaatataacgataaacgtaaagctgaatttgaggataagcttaaggctcaattcaatgagaaacttaaaactgattttggaaaaaaacttagagctaatattacagataaactcaaagttgagtttgaaaataaaattaaacctgaaattgagaagaaacttaaaacaaagtttgaaactgaattcaaagctaaaattgagaatgatagtaaaactaaaactgaaactgaaactgaaactgaaactgagaatgatacaaatacggaaatagatgataaactcaaaaacaaaattgaaaatcaagtcaaagctgatttgataaaggaatatgaaaatagattcaaaatctactctgacaaattagattctgataaactaaaacttcaaaataaaaatgctactttgaaaaccactatcgaaggtaaggataatgagaaaaaattattacaagagcaaataggtaaattgatagaggaaaagaccgaaattactaaaagagaaagtgaattaatcttacagcatgaaactgagatgaagcaattaaaagatgataataaggagaaaattaaggaagctaagaaaactgaaaaaaatgattactaatctgatagcacaatatgagaaacaaattaaagatatggatatgaagattaatgaattgaaatcatctaaagatagatatcaaggtaaagttgatgaattaaaagttgataaaattattgaaacaattaagaaagagaaagaatgtttatatattgatattgaatttaggatttttaaagatgggaaaatattgtgtttatatgatggtaaaagtggaaaagatgaaactattgaagataaggaaattttaattaaatgtaaaacatttcaagaacttatcgttaatcaaagtaaagcggaacaaattataattcaacatggagagctgatcaaggaaatattaagtagatatgaaattttaaaaaggtattgtaataaactaagaggtaaaaatttagaatatcttgaaattattaagaaattaagtaaatatgataaggaagaatttagtgaattaagtcgaattttattcaataataatatttttctacaacaaattaaggaaattgttcatgatattagtgatgatgaagagacattaatgatgattgatccaaagattttacaaaagcttaatattttaaaatgtgaagttgaaactgtacgtaaaggtattgaagaaataattggggttgatagggaggagtaatttgattagagattattcttataaataattaattaattaattaattaattagatagatagttagatagatagatatgatatataagattaatataagataagtattgttataagcattaaaaattataatttacataagagcatccaaggtacaacaaacacagagagcagctaaacaagccatacaacaactatcattattacttgtttgttgaggaggttgttgaacataaacaggttgttgttgttgttgataatattgttgttgaggttgttgttgataatattgttgaggctgttgttgataatattgttgttggggttgttgagagaacatacctttatcactactaccgttaccgtaataaccttgattttgaccaggaggaggaccttgaggtggttgataagacatatttaattaaacaattgcaatgaggctgataagcagaaagtataaatagaaatagaaatagagatggaaataaaacagaaatgaatacgtaaatgtaaatatagaaatagaaatggaaaatggaaaaaatacatgaaacagaagaaaaaaccaagaaattaatgggtggcttaaaattgggggaagggtgctttatttgggattcgaagtgaggtttaagcgatcattactgcctttttttcattaaggtttgtttattattatagttattagctattagagttttgatgatttattgaagctacaacagaataataaaacaacaacgacacacatatatagagaaatacacacacataatgaatactacacaaacaatgacacgaaaagaattgctacgactatctgcagaaattaataataaaggttttgatactgcctctggatcaggagtagattcaggttcaggagagtatgatgatcaggatcatgatcatgaaaatgaaatgatgaatttgatgatttcactttacataatttaagagatctgggtccaattaaaaaactaggtggattatctgcattgtctgaatcttctggttcatctgcatctacagttgtacataatcctgaatttcataataataatgaaattgaaaataatattgatgttattggacttcaaaatatagttacaattgatgaagatataatacgaaaaagagagattactttaaatgataacaatgataagattgatgatccaatagaattaattgaaagaccaagttcaccaccacgtgaaattgatccaactaaattatatgcattatatgatttttcaggtcctgatccttcacatttatcacttaatagagatgatgcagttcatttacttaatgatactgatgtttattggtggttagtaaggaaagataataatggaattgttggatttgcacctgctgaaattttagaaacttatggtgaaagacttgctagattaaattgttggaaaaatgaaatacttgaacgtggtaatattaatgaactggaaaatgatgaattagaattatttaataaatttgtaaatgaaaatgattcagttgaagttgaaaggaaaggttcatttaaaagacctttcttaactaagaaaagtgtttcatttgctgaggaagatgttgataatgatataatgaatatatcacatagtgagaatgagaatgaaaatgaaaatgatggtaatagtcatatgaatcttaatagtgatgaagattgtgatgatttcagtatattacgaaattatgaaaattttgcatctgatgaagagcaagagataaatcatagtattgataatgataataatgatgatacaatgatgataatagtaatgatgataataaaactattactcaaaaacaaatcaataccattatccgtacctaagaggagaaatatgtttataaaagatttagatacatatgatggtagtacaattggatctggatcggttgataataattcaatgataagtgaacataataatcaaaatactaacacttaattcatcaaatgatagtttgaagaatgaaaatataagtaaatcagaaagtgataaaaagtatacctattttaacaccagctacttcaacttcaacaattcctcaaaggttggaatcattacaaatgttagatgatttattagacatgtatcctgaatttattacactagatgaaggatttgtgccggaacaggaagaacaagtaatatcaacaaattctaatatcaatactaatactaatgctaccaatactaccacttcttcacctctatcgcttcatccctcgtacagccagtatctttgatccagtgatgtcccatgtgcaacaacttgactctctcatcaacgaactcgtagaatagcaatacagctttaatataatatgtatacttacgtaataaaagaaaagcggtaatacgcagattttcaccttttttcaaattttgatttgctttttacatgattttttacttgaatttggaaagtgattgtattaaatttattttaaagcaaagttgatagtatagttggctagtcatctgacgttcagtggttcattaaaatcttatctattattctccaactaattaattattatgtcttggactccagatccgtcaagtactcttcaacttgtacagatctttgcaggtacactttcaagtgatacaaatgtacgtcaaaatgcaacaactgctctttcagaggcaaagaaaatcccagattttgataattatttacttcatatacttttggcaaatgatgatttatcaatagaagattcaactcgtgcatctgctggtatttatttaaaaaatgatttagtgaaaaattttaaatataaagatcatgctttacaattacatattttacaattattacctcatggacttttatctgaaagttcatttataaggaaaattacttcaactattataagtgcaattttccgtgctgttggtaatcatggttggccttcacttattcaagatttaatatctttacttaatggtgctgctggtcaattagccattgatggtgcatctcaagctttagcttcaatttgtgaagattcaagtagaattttagattatgaagttcaaattaatggtaataccattgtaccaatgcaattattaattcctcaattaattcaatcaatcaataatactaatttatcttttaaaattagatcaaattgtatgaaatgtttagtttattcaaccaatacaggctcaaattcaatttatactaatttagataatatattaaatacaacttttacattatgttcatcagataatgaagaaattcaaaaacaaattagtttaatatttatctcaattttagaacaatggcctgataaattatatgttcattggaatggtatagtatcttggtgtattcatatgattagctcaaataatgatgaaactgtttcattgaatgcagcagaatttattttagctatgtcaactaatgaattaccttcagaattagtactaccgtatttaaaaggatattatacctttaatgttacttaaaatggtttatgatgaaactgatgttgaacaaatggaattagaagattcaaaagatgatggtgcagaggataaagatgaagatattaaacctcaaattgctaagtcaaaggaacataaattatctctaaagaaggataatttaaatgaaaataccacaaacacaaataataataatgacgatgatgattccgatgatgatgacgatgaagatgatgaaaacgatgatgaagatttcaattatacttggaatttaagaaaatgttcagctgcaactgttgatattttatcaacttcatatcctgaacaagttcttgaatattcattcccaataattaaaaataatatgaatgcaattgaatggccaattcgtgaagcttcaatcttaacacttggtgcaatatccgaagctgcattaaatcatgcaactcctcaattacctgaacttgttccattccttgtggaaagattaaaggatgatcaaccacgagttagacaaataacttgttggacattaggtagatattcatcatgggtttgtatggaagctaatgaaaatggtgctttttcaaactatttcactccaactttccaatcaattatggattgtgcacttgataaaaagaaagttgttcaagaaagtgcttgttcatcattagctgattttattcaatcatctgaagctcatttacttgaaccttttattgaaccattattaaatcatttccaggtttattttgcaaattatcgtaggaaaaatttaattgttctttatgatacaattcaaacatttgttgaaaaattaggtgaaaatttaaaatataatccaaattatcttgatttacttttacctccattaattcaaaaatggcaaaatttagatgataatgataaagatttatggccattattagaatgtatgtcatcagtggctgcatcaattggtgaaggttttgctaattgttcattaccagtttatcaaagagcgatgagaattttacataattgtattgaacaagaaaaattatcacttaatgatccatcatttataccacctgaaaaagattttattgtttcatcattagacttaattgatggtttaattcaaggtttagcatcaaattcaactgcttttattgcaagtaatgaatccaatcaacaatattctttaatggaattaattctcacatgtttagatgatgattttgatgatgttagacaatcatcatatgcattaattggtgatattgcaatttatttatttgattcacttattaaaccttttattcaaccattaatgatcaacatttatcaagaaattgggaaattaaatcataattcaattgcttcatgtaataatgcaatttgggcattaggtgaaattgcaattagatcagattcaaatcttttagatcaatatttagttaattttttcaaaattttagaaccaattattcatgatttaaatgctgatacaacattacttgaaaatgttgcaattacaattggtagatttggtattaattatccaattcaaacatcacaaattgctcaagaagtacttataatgtggtgtgaattaatacaaaatttagaagataatgaagaaaaggaaagtgcagttaatggtatgtgtaatattattttgaaaaccccacaaattacaaatgatttgggtaatattcatgcaattatagatttgatcaaaaattattatcatccaagtgttgaattagctgaagttttcaaaatgttattggtaggatttaagtccggtttaggtccagaatgggattgtatggttggtgtttcaaatgtgttacaaagatatggtgtttaaagaattaaactttttgaaaaaaaatgaatctctgtataaaatatataatagacaaaatatataatcttaataaataataatagtaaaactaataaaaaaattacatacttttagaccatcacttagtcggttctaggttctaataataattgaccaagtggaacatcacttacacctttacccaatgcgtaaattgaattacctctaagtatagtttcaacaactctaccctttaatgatttaccatcaaatgcagttaatttatttttaaagaaagttttagcatttgcaacagtatattccatttctgtattgaaaattgcaaaatctgcatcataacctgtttcaatcttaccctttttatgtgacagaccaacttgctttgcagtattgacacaacaccattcaacaatatcagtaatatcaataccgaattctttagtaccaacagtatatagtaaaggtaaaccaaaaccaactgatgagataccaccccaagcttcaaagaaatcacctctctctaaaccctttaattcaggtgtacacggagaatgatcagaaacaactgatgtaattaatttatttttcaatgcattccataataattgacgattattattatcacgaattggaggacaacatttgaattgtgttgcaccatcgggtatatcctctgcacgtaatgataaataatgaaaacaagtttcaactgttaatggtaaatttaaatcttcctttgcatgtttaatcattggtaatgcttcatgagttgctaaatgaacaatatgaactttagttgttggttgttttttcaaacatttaataatattataaatagcattacattcaaatgaatcaggacgtgaagctaaaaatgatgaataagctcttggattaacagtttcaagtattggtttattttccattgcaatttttaatggtgtattatcacctttctctaaatcaacatccagtgataattgttcatctatgtcatgattatgattaattaaatgattaattttaccagttaatggttcaactgcatttaatattggtgatgtagctaatgcttcagcttgagaatctgtaataccatcataatgatgattttcacaacatggaattttttcattatcttcctcctttggagatttatccatttcagcatgaaacatcaacattgtatgttgatccttaacttcttgtaaagctttatcaatataatctggtgtaatcattgggaattcttcaacacctgaatccatcataaaacctttaaaacctctaacacctgcattgattaatggaactaaatcatttaaattatcaggtactaaaccaccccaaaatcctgtatcaacccaagtttgacctttggcagaattcaatttaatatttaaattttttatattagtagttggtggaattgcatttaatggcatatcaataactgttgtaacaccacctgaagcagcggattgggtacctgatgcaaaaccttcccattctgtacgacctggttcatttaagtgaacatgtgcatcgacaagacctggcataataacgaatggactcatatcacgataattttgtatatcatattgatctaataatggatcatctaatgaaagtacacctgagataactttgatgattttacctgaagttttagaatatacaatagttgcaggtttaacggaaccttcaattacaacctttgatgatgctattgcagaagacattgagtatgtttaatgaaagaataagttgatatgatttaataataagaaacgttaatctaatatacgtcaaaaaaatttatcttttttgattaatattgtgtcaaagattaatagtttgataatttcaagataagagaagagttactcaagaggaagtcaaaataagtaatttatgtcttgtatacactcggtcctctcttcataactctctattcaatgtgtaaaatacgttgatattgagaattaccaatcaaagtgaagaattggtgaaatattatcaatttcggtcttttccgataagtgtggtaattaacttctaaattctatttctattatgtttattatagttaatggtggtatattatatacacggtttatattacagagatagtgtctcttgaagaacagcactcttggttatctcttcactgtatttaccacctgttagatcatgtaagatagagactgccttttcactttcaatattctcaataccacctgcctctgcaactttttccttccactctttaagaatggttttcaataactgtttaccctctacatattcctctttactatacttcatcttcttattagagtctgtaatatcaccagtagtaccttcattattttcttcttcctcttcttcaagttcattggcctttcttttagccatattaatgattttttgtgggaatttaactaattctgcaacatgtataccaaatgattgatcactaatacctggttcaactttatataataatgtaacattatcctcagattctctaatttcactatttttagcattttcatcaacatgtgcaacaacgtgtaaattaccaacattattatattcatttgataatgatgttaattcatggaaatgagttgcaaataatgtccatgatttaatatttttagctaaatattcactaattgaccatgcaagtccaaatccatcatatgtacttgtaccacgtcccaattcatcaacaattactaaactacctttatttgctgatgatataattgatgacatttcaagcatttctgccataaaggttgaaactccctttaattgagaatcagatgctccaactcttgcatggattgcatcaacaattgcaatctcactttctgatgtacatggtaaaaatgatccaatttgattcattaaacaaataactcctaatgttctaatatatgtagatttaccacccatatttggacctgtaattaaatggaaatctttacctgattgccattgttgtcccccttcattacttgtaacaattgaattttcatcaccttttggtcctaatacataatcatttggaataaatgaaactccttcacttacttctaaacatggatgtcttgattgccaaattctaattttcctattttcttcatcattaagtgcccaaattttttttggttttgtatattcaattggtgcacatgttgcaacaactgcaaatgatgaaataacatcaagtgaatctaaaactattgaaagtttagtgaaaattggtatataagttaaagtaattgatttaatttcatttacaattgttgtttgttgttttgaatattcaaccattatttcattaaatttattggataattcagataattcattatttgtaaagaaaacacctgctttaatagtttgtaattcttgatattgtgaatttttagaatttttactcttaactgaagttgattttccacgtaatacacctgaatcatttctagttaatctaaaacaccaaccatgattaacattttgttctaattttaattttttatcaatttccatacctagatcaattgatgcatcttcatgtaattgatgcatttgactttcaacttcttcacgtttttgtgttaattctaataatttttcatcatattgtggattaatttgaattaatgaagaaattggtgaaactgatgttgcatttgctaatgattctaaatcaattgtttgttcaatcatatccttaaatttatcaagtatatttttatattcaattaattgtttaatccaaaattcaataactaaagtactaatttcttcatcatcctcatttatattctctaatccttcattaagtatttcaatacattcatctaaatttttaactaattgatataatctaacaacgtcatctaatcctgttgaccttttatttgttaattttttcaataatctagaaatatcaggtacattacttaaaaaattacctctaatatttcctaataatgttgaattattaacaaaccattcaactaatttatgacgtttctcaatttcattaacatcaattaatggttgtttaatccattgagctaaaagtcttgaaccaccagcagttttacaatgatttaataatgcaaatattgatgttgggccatatgataaattactattattattgttattatttgaattagaattaccagttgggaataaatttaatgccttaactgcagctgcatctaatctcatataattttcaagattatatttaaatacatttaattgacctctaactgagtcattacctaacaatccaagatataagacttaatgcatttgatgaagctaatgctgttgtcattgaggataattcagaagttgataaaatatgttcattattagttaaagaaactaaatcttgatctgaattgttagaattaaaagttgatgaggaaacttgagttataagtatatcacatttatcaattgtttgagttaatcttgtaaattcaatatcagttggattagttagatgaactaattaaacattccttaatacctaattgaattagaatagattcagtattagaatataattcagtatctaaatattcacttaatcccatacattttaaatttggatcataaaatgctaatcccattttcttaccctctttagcattagatattaatttaacagctgcaataattgaagatgatgaaactaattgagaattttccagaacaacttcgtccattatcatcaacatttgaaaacattatatcttcaatttcatccaaatgaccaggagatccacttttcaataatttccaaatatgattcttactatcttgaataccgtaaatttcaactttataatttttatcctaatattaaattttgtaataatgaagaaaaagttttatctgataatggtaaatattgaatagatactttcctatcaatatctttaggatgagcaatcattggagatgatttcagaactgaatgtgatgaataaataatttctgatgctaaaattgcatcttcatcaaaaactgtataataagatgaacctttattaccatttctaattaaagctctaaccgttctttgttgaactggtggtaaacgtaaatatgaacgatatattgacggttgagtttctgattcctccgtatagacgttagcagacattttgttgatgtttattgcaaaagaaaaaaagttgttgattggggatagaaatgtttgttgaaataaatagtttgggtgatggtttattacgtgtcgcgttgcttatatagaggacccttaatacataggagattgtaatattatattattatagaactacttttatgtataaaaagactaacagtatcattaaacagattgttcatcagtatcattattattatcatcaattgattttgctttattataaaggaaaaattgacaaaatatgataaaatcttcaaataaggtaccacaactaccgactaaccaagatgaattaactaaaaggtatttcttccccgtacaaactgccaatatggaaacaacgtaagttatattacctaaacatgcaaaaaggaagaataggaacgcaataccatcacatgatttacgttcaaaatttaataaaatttgtggaactcttgaacctagataaaggaaagcacaaaaccaaccaaaagtttgagccaatggattaaagataagatcatcatctgatggtggaggtaatgtaggatcattattcgaacctgaatcaccaaaataccaaccaccaaaacctgcaatcataaccaataataccattattaaattatataataattctgatttaggatttgttgtgataggaagatattgaagagcatgaagaagatgataaatttgatgaatttgatgcttgtgttgaaccattgtgagggatttgaaccatttatatcattaaaatgagattctgtataagattcattatttgcttcaactataacttgcattgcagaatcatgatcaacttgatgatgatgttgatgatgaggattatcgttagataatactgattctaataaaggttccagttcagaattgagtggattagcaggtgataaatgaattggatcaacattcttatttttaataccatgaccataagataagcattgccaaagaagtactaaatctgctaaagtataataaattgctaaaactgtcattgttggtaaaacaccttgcattatagctccaataacattgaaaatatcacctaataaccataaaacaacgaataagaatgataaaccttcagcacttttccttgtaaaattttgatatatttgaggtgcaaagacaataatccaacaagctatagatattgagcctgtgatacctgatacagcctgtgctgtgatagcaggagtagggtggtggtgccatgatatatataggtgatgctttaaagaagaaagaaagcaaagaaaacataggagaaaagaaagaaaagaaagaaaaaaaacttctttttccaatgtcatggaaaataatcatctttattgttctattctgagataagtggggatcaatagtacattatattgagatattatgggtattttacaacataataaagaccatagcttacactaatactactatagaagcactctctaagatataaatactgtgataattactataatacatagtgataataccccccaataccgactcttatcactgtgaaaagcaatagaaattgaaattttgaaaaacttttcactgcgaaattttctatcttattgtaattggatattgatattggtattggtaattggaattggtattgatggtaaggacagtatgagtgaaagtaatagtgtcaatgatgctagtaatgttagtaatgtcacttaatgacactaatgacattaagataaatgaaagtggtaagattgtaccacctgaaggtatgactaaatcagcatataagaagatgttacgtaaacaaagacatgaagagacaaaagctcaatatagattacatcgtaaagaattgaaaaagaatagagatttacaacgtcgtgaagagattgaaaaattaagatctgaaggtaaagaatttaatcatttaattaaaccacgtaataagaataaattaaataaaacttatcaaaaggagaaagatggtgaaattttccaaattaatccaattaatgataattcaaagattaaaattataattgattgtgcatatgatgattatatgactgaaaaggaagttattagtttaagttcacaaattacaagagcttattcaactaatagacaagctgttaaaaattattattcaaaggaaattgaaaaaggtatgaatggtaataatgaacctgcaccaacttttgatattgcaccaacctgtaaattatttattagtggtttagataagagattaaaggaaagatttgataaagttttaccagattatgccaaatgggatcctgaatgtgctaaattaactgaatcaaatcttgaaactgttcttaaagaagattgtaaagttaatgaagaattagataatgttgtttatctatctgctgatgttgatgaaaaaattgaagaattaaaggctggtgaaacttatataattggaggtattgttgataagggacgtcataaaaatttatgtaaaggtacagcagaaaaattaagtcaagataaaggtaaaaaaatacgtattttaagattaccaattgatgaatatattaaattaagtggacgtaaagttttaacaactgcacatgttgttgaattattattaaaatggtgtctatatagagattggaagaaagcatttgaagaagttttaccaccaagaaagttaaaagatggagaaaatggtgatgatgataatgatgatgatgatgaatagattttattcttgtttaacagtatccttatccttttcttcactcttttcttcactctttcttcttcttttgctctcttttgatttaatttaactttggtattattataagtaccaacgatgaaataacaaaaagcaaagaaaacagaccaagcttcaggaatgacaaatttttgtgctaataacataaatattggacttgttataactgaagttgatgaaactctaataaaatttgtaaataatgaatttttaacaattttaccaattaatttgaaaaaattaatcaatttaagttttaatgtagtattttcggaatttgattttaattgatttaataataattttaaattattaataataccaatccaagaaacgaaaaaggcacaaaaaattggagttataataccagttgataataaaatttgtaaaattttcttacgagtagttaatggagcaggaactaatttttgaattaattgataaccataatgagtaaatggggcgttaataagaccagcgaaaacacccataagtggaactcttgatgttaatgtatgataaatgttaatattatctgataatttaagacattgaatatcaccagcaaagaaagaagctaattgttcatttaatagagcaaagaagatcaaagtgagagattttgtcaataaaggtttcttctgtagattgattagtgtatctcttgttgagatctagtaataattgagtagacattgtcgatgtctcaatgaaaagtcagtttcctccagattcaacactatcaagctcccaagatcaaagattcatgctactgataagctgaaaaatggaaaaaaagacgcgacttctcaatgtggaaaatttttttaatttttcaaaaatttaattttttttccactaaaaaaaattttttcactgcttttttttattataatactaattctctgataatttagttattttatgtattttatttacttgttcttgatactttgtttccttttatcaacaagtcgtaggctttaatacttatatatacacttacagacaatggctttcgaacaaagaggcggtagaggtggctcaagaggtggttttggtggttcccgtggtggacgtggtggatctagaggtggattcggtggtggtagaggtggttcccgtggtggacgtggtggatctagaggtggtttcggtggtggacgtggtggttcccgtggtggtgcaagaggtggtagaggtggttctcgtggtggtagaggtggtgcagctggtggtgctaaaggtggtgctaaagttgttattgaacctcatagacatgcaggtgttttcattgcaagaggtaaagaagatttattagttactaaaaatattgcacctggtgaatcagtttatggtgaaaagagaatttctgttgaagaaccttcaaaagatccaaatgttccagctacaaaagttgaatatagagtttggaatccttttagatcaaaacttgcagctggtattatgggtggtttagatcaaatatttattaaacctggtgctaaagtactttatttaggtgcagcttctggtacatctgtttctcatgtctctgatgttgtcggtcctgaaggtttagtttatgcagttgaattttctcatagacctggtagagaattaatttcaatggcaaagaagagaccaaatgttatcccaattgttgaagatgcaagacatccacaaaaataccgtatgttaattggtatggttgatgttgtctttgccgatgttgcacaacctgatcaagctagaattattgcattaaattctcatatgttcttaaaggataatggtggtgtcgttatctcaattaaggcaaattgtattgattcaactgttgatgctgaaactgttttcgctagagaagttcaaaaaatgagagaagaaagaattaaacctttagaacaattaactttagaaccttatgaaagagatcattgtattgttgttggtacttataaaagaagtggtttataaattgtttgaataaataaacaaataaacaatttatatgaactattatcatattcagatatcaaaaaattttaatttaaattaatttaaaaatatttcctcttacccttgtactcttttcttgtgttcgtttctacaaattacatagttttataatcaaaatagtaacaattatattataaattatcatcaatcgttataatagctcaacctatgtctcaaagaagtttcgtaaatagcgtgtattacctaatacattgaaatttctttttaaaatttacatgtcacctttaccttaattgtactgttttatcttaactttactatgaagtttatctttatttcttttccatttacttctcttctagaactatttatgaacctatgtcaacttctagaaatataagattatccagagtagtggaatctggtggaattaacaatatactacccgatactcatagtattagccataataatcctactgagattatatcaaatgaagataatgataatgataatgatgatgatattttgataacttctacaaatattcgaacaaatcctataactccaacgctggattttaataatagctcacaatccctggcacgacgattacagaatcaattttatgatcaaaatcaacaatctaatagtactaatattaataataactctagggactacttacctaatcaaaggcaaataactccaatgatttcaattgatgaaatgcctgatatgagtgtaatggattcattaccaataatatattcaatacccaataatcatatccaaaatgataccaataataataggtaataatagtaacataaataataataatgaaactagcaatggtcctatactgataagttcagatattgaagatgatttacaagaaattgttgaagttgaagaaattgatcatagtaataataatgatattgaagatttacaaagtgttgaattaaatgaaattccaattaaataatgatataagtgatacacattcagatactgcaactgctggttcaattgaaacttcaacttcttcaattagaaatagaatggcattatctgttgatgaaagatctttaagaaatgcaagaaatacacaaaatgaatatttaagaaatcttgagaaattacagacttcaaagaactcaaagaattccgaataatttagataatagtccaaatgttgaaattaatttaatagatgatgatgatgatcggtgaaactagtactactaatactcataataataatgatgataatgatgatattcaatttgttggtgaaagaccagctcctgatattgaaattttatcatcgattgataatcctaattcaacatcaaatttaaactctcctggtttccaattatataccccaatgggatcattatttgtacctagttgattcaccaaatgaaactaggagaggtggtggtaggatattcaatgactttaggaaatcaacaaccattaccaccaaatgcatcagctttaagaaatttctcaagttttatgagaattgatcatcatgccagtagaaatcaagaaagattaagacaaattcaacgtgaagcaaatagaagagcaagagatgcagcagtttcagcaaatacaagaagaagagttggtggtgtaacagttgctgatagaattagtttaagaaatcaaagaagaagatcattagattcaaatagtagtaataatagtaatggtaataatgaaaggaatgttagaccaagattaacacatgatcaaacaagtagtcaatcatcattctctaattctgaagattttagaattttacaagcattatcaatgagaagtaattataattttaataatgatatgttatcacttgaaacaattggaccattcgatgctcatacaatacttgaaactgattcatcacaaagattttttgataattatacaaattctattaatagtaatgaagaaatacctgcaaatattatgagaattattcaagcaagagatgaacatagagaagaagagagaattttatcaagaagtaaagttgcaaatgctgaaagaattaaaagatctaaagttgcacaagttaaggaacaatataaaaatgaatatagtaatgattttggtgatgaatctcataatgatgtttgtgtattatgtggagtttcattagctgaaggtataccaagaatgtatgaggaaaaaaatggtaaggatgaaataactgaagagaaagatattaaagatttgatagatgaaggatttcagattaccatggaattttaatgatagatattcacctgttgaaattgatttatcaaagaaagtttattttagtaattgtggacatatttattgtggtagatgtgttaaaaatattgtcagatttaaaggtatgaatgttaaggaacgtcgtattgaaaagtctaaagttaagatagatttaaataattatgagaatatgacaatggaagagaaagatttacgtaaatcatcactttgggcacccattaaatgtgttgcaaaagattgtgataaagcattcaatggtaagaaaccatttactgaaatgtatatgtgataattatttaaataatggattagttgatattatattaatgaaggggctctgagagtttaaatgagtaaggcacattctaatgtttatcaatccatcttgtgtatctaacatatatcctttctaaattgactttaaggtggttgtatatagtaagtataaagtttttacgttaaaaattacatctgaaatatgtacacattacacataaaacaatgttttaaatcttttattttttgataatttccgtcatattcttgttaatagtttatatctaaatcaatcactacatatatatatatatatatataagaattcattgcatttactaaatactgaggcagtaatggagaatacgtgacattagtcaagtaccaaaagaaaagcaacaaaggattcgaaaacagtggccatgttcgtgtcgtgtaagaaaaaatatgcagttgataagttgataagttgatataagtgggtgtttatagttctttcttttggaatcaatgatgaaatatgcagtatgtgtgaatgaatatgtgtttgggatatatagagaagatatactaacattaataattgatatagatattaataatagttttaggaactatagtatttggatcattaaattccatatttactaaatatcaagatatgcaatgtgttaaacattgtgatgatccattaagggcagtatattttgatcaaccagttttacaaacattacaaatgtttattggtgaaatgttatgttggataccattttattttatgaaaagaaataaaattattaataatgatacagtttcacttttacctgatattacaacaactaagaagaaaccaacatggaaagattcaataattttatctattccatcaacatgtgatttattaggtacaacattaatgaatattggattaatttatacacctgtttcaatttatcaaatgactagaggttcagttattttaattgttggattatttagtgttatttttttgaaaaagagaattacaaaacttgaatggattagtttattcattgttttctctggtgttttcttggttggatttagtggatatattaatgaccaaagaaatgtatctgtattaagtgatgataaacaatcattggatattattgttggtatgatattgatcttttcaggtattacaatgacagctgtacaatttgtcgttgaagaacatattttaacatatttggatgttgaaccaatggaagttgtaggatatgaaggtacttatggtacattagttacattattaggtatgattattggatatttaattaatggaagggggtattttgatttaattgaatctttcaatcaaatgtttaataataaaattatactttatacctcatttatgattatgatttcaatttcagttttcaatttttgtggtattacattaacttattcattaagtgcaacttcaagatcaacaattgatacttgtcgtacattattagtttggataatttccatgataattggatgggaaagtttacatttattacaattaaatggatttttattacttgttatgggtacattagcatttaatggagtaattgaacctgaaaattgggaatttattccattttggttaaaggaacttgaaagtgatgttagaacttagaaaattaaatcagattaaattaaattaaagtgcgatgtattatttattattatctattattacaggcttttataacgttctttacaaccattcttttttgttgtatatcagtaaatcaattaatcagtaagtaactatatatacataaaccaatgtcggaaggaggtcgattatttaaattttcattaccatttcatgttaatcaacattcattaaaatcaattacaatgtatatttcaggtattttatattcacttggattatggttaatgattgatgcatcattatttagtaaaacaattaatgcatcagttgttcatgttacatttcttgattggataccatttatttgttcaacatttggtatgattgttgttaattcattagataaagttcaattaattaattcaaataatggtatgggtagtggatttggttcaaatttatcacaattacaatggcaagctagaattgttttatttattggatttagtttattagctgttggatttaatggtagtgtcttagttttagttttaaaatttttaattaaaggatttacagatttcccaactgttaaaatgggtacagaaaatgttggtgctaatttttgtgttatgttaagttgtgttattttatggattgtttcaacaattgaagaagataattcattagctttataagtataggaaatgtatatgaatgtcgtaatattaatcattaagaattagaattatataagaaaaaataaatggtgataaagtggagagtgataaagtaaagtaaagtagattagagtaaagtgaagtaaagtaaaatatagaagaataaaaaaaaagtctagtataacattcattattattaattaattattaattattaatcataattaaattatgatcttggtaagatatcattaattcaatttaccaaaagttttcaattcataatcactaaaattgaataataaactatcaactttaattggatcatttgataatcttgatttaacattaaatttaactgatttaatttcatcaaaatatttatgtgacattatttgtgaaggattaaatctttcaattggtgaataaactaaaactttcattaataaatctattgcatctaaatttgcattattgaaaactttttgaaatctaacatcaattgttgaattataaattttatgagaatataatggaccattatattgaggatttgaagtataaataaattcatcacttggaggacctaataatttagtaatttctcttaattgtaacattggttcttgaccttggaaaactggtttacccatatacatttcacccattacacaacctaacccccaaatatcaatttttgttgtatatatacaacaaccaacaattaattctggagctctataatatcttgaacaaatataagaaactgaaggttgatttggttctaaaacttttgcagaaccaaaatcacaaatttttaataataaattttcaggatttattaaaatatttgaaggtttaatatctctatgacaaatttggaatgaatgtaaataattcattgctctagctatttggaatgtaaaaattttaatatgattttcaggtaatgttgatttatttatataatatcttttaatttcactttgtaaattacaaggtaaacactccattgctaaatgttgataaattctattattatcatctttatttgggtaattataataatattttaaagccacaatatttggatgattagtttgttttaaaatttgcaattctctggatttatattcagtttgagcaggtacttttttaattgcaaatggaccaatccatatatcttgagggctatttggttcagataatgcatttttcaaatttgccttgtaatacagtaccgaatgccccttcaccaattttagttatttcttgaacaaacatgggacgagtaattcctgatgtattacttgtaacatctttaactaaatattcagacattgtttatattctagtaatttattctaatagtgatagtaatttaatttgaaggatgtaataaaggattatatgtgggtattatatgtatactctgtagatataattgatatctgtatttaaatattaaaatgaaattcttaaaaaaaaaacttatttacaaggggggcgttgtaattagttattgtaatagtaagcaatatactttaataaatcaattgtgttgagatgagataagataagatgagttaagataagttaacagactctaagatatgttgagtaactcaattggtatcaattataaatattaagtcttcaaagaaaggtaataacaggtgttatacaatagactgttccaaagggaagacatcggaattaaaaataaaaataggaaatttaatataggaaataaataaatttatgcgcagattcaatttccgaaattatttattttatttttaacaacttatagcttatttatggctgattattattattattaggtcatatactagtagagttagttacactggattatagtcggttgttagtttagtagtggtattatgttgtagaatattaatagtgtattagtatattattactacaggtataaaaatataataaagtggtatgactcaatattgtaatatcctttctattaagtaaaaaaaatatttagcaccggttggtttcgatccaacgacatcagggttatgagccctgcgcgcttccactgcgccacggtgctgttttagggttttcataggtgtttgagcagtggggtttttgttactttgtgtcacgtgacgtgcttttttaatattacgattgtttttgtgtttttgttgtattttaaaatttggtagttatttttgtttaaatttaagtttttataattttggaaatgtgttttaaaaaaataaaaattattttaatcaaagtgataacattttttttaagaaattactttttttacaatcaaataactataacaactattacagcaccacagttattattaaactaataaatatatacaataaaagcaataatataactcatctgaaaatctattcaaccaatatacaaagtaagataattttaatgatgtaataatcactaagtaaaaatatcgctaatactaagaaaataaaaaatatttaaatttcaccatataataaaaagatcaacttcattctttccatgtggaagatatatctatagtgatagatctgatactgaatatattataacaatgctcagatcatttagatatatcaataattctacatcatctttcaaaaaatgtacaagtaaaggttttttatagcacatcaattgatccatatactgataaagttaataaggctagatttgattgtattgatcaattacaaaaggcagatcccatcttcattatttatttcaaaactttatcccgaatatttaagagatgcatttattgcatttaaatcttttaatttagaattaagtaaaatttcatttggtttccaacctggtgcaactgctaaatcaaaggaatttaataatttaaaatttcatttttggttacaacaattagataagtgtaacaatttatcattatcaaatgcatcacagataatccttgatattaatgaaccatgtacaattttattatctgatataattttaaaagatttaaaatttaatattgaaatgttaaagcaaatggttcatagtcatcaacatttttataataataattcatcaaatggttttaataatttagatgaaatttgttcatttggtgaaggtactcaatcacaaataaattatcttttacaatcaattttgttatcacctcaattaaaagggttttcagatattggtattgaattattagaattaccacattcaaattcaaataatttaagaaataatttaactgatataagtgcacatttaggtcaagcaacatcaattggttcatttcttattggattaaaatattttgctgaaaggaaacaatcattaatgttaccaattgattgtttaactaaatatagattatcagaagaaaattgtttaagatatttacaaggtggttatcaagatacttctgatattgaagaaattaaagaaaaaattaataatgttgtatttgatgttgcaacattagcaaatgatcatataatatctgctagaagtaaacttgaaactgctaaatcagatataattcaaattgcaaatgataacaataggaaagatttacttaattgtaaaaaatcattccctgaatgtttctttttaccttatatgtcaggtataccaactataatgtatctggaaagacttgaaaagcataatttcgatgtattacatccaggattacaacaaaaggaatggcgtttagcattccgtacatggaatgcagaccgtactcgttcattttaataagatactactcttacacttactcttactatactatactatactatactattcccacataacttataactctctgtacataaaataccttaacatagcattctactaacaacacgaaaaattgtcgttaactaaaattctcgccctctcaaaaattcaattgcatcattaacggatcgattccttgacattgttttgattaagtactgatatatttcttttgataaatcaaatactatagactgaactagatgacctctgtggatacagagacattggagtctttgaagtacacttcatcattatctaaaatgaatataatggatccacttgcttttgtcattcaagaatcaacatttattctatcagcaatgcgaaaggacaacaaatcaaattcaaatccatttgctgcaattttattaaatcaattcttaaatgatacaagttcaaattcaacctcatatgatgaagaatctctgaatttaagttcaattccgaatagattaaaagataataataattcaaatactcatcataaatcaattaataatttaaatactaataatagcaataacaaatcttttaaatcaaagatgatgatcattttatttctgggtttgtagaattacgctcaatcttgtctcaaacgaatgatatctcattaattgatataattactcttttacaacctttcctagttgttatcaaatctccttcaacttcttgctatattaccgacttagctgtcttcttcattatacaaattcttcaattataatatagttaataaagatcaatcaaatatagttcaagcattatctcaaatagtttcaactttagctcattgtagatttgaaggtgcagatcaaactcatgatgacttattattagttaaaatcattcaattactagaatatttagttacatcagatttaaataattatcttacaaatgattcaatgtatgaaattgtttcaacttgtttttcattagctattaatacaagaagaagagatatgttaagaagctcagctgaaaattctttattaaagattactgaaattttatttagtaaattgaaaattttagaatcaaaacctgaaattgatcataatactaaaagtgctgctcaactagaatttaataatgaatctttacatgttgacacaattggtagatcaactccaacaccttcagatagtcaacttaatgatgttaatgaacaaagtaatgataaaaaatcattaaatgaaactatagaaaaagaaccagaaacatcagtagaagaagagaagaaagatgaccaagaagaagataatgaatcaaatgtcaacgaaattatagatcaaacatcagaatcttcagatgaattaccattatcaaatattaatgatgataatactgatctgtctccttatgggattccatgtatgagagaatttttaaatcatacggttgatatcttattacctgaaaatagatatagatttacagaaagtacaagaattttatcattagaaatccttattagaataatagaagttacaggtattcatcttacaaaacattcacaattattttcattatttgcagataattgttgtcaccatattgttcaaataattcaaaacaatgaatcaactgcattggtgaatttatcaatgagactatttttagatttttcaattaattatccaaatcatttaaaagttcaattagaattaatgttaacgacaattataaactcaatcatatcagatgaaaatattatcaatgatgaattaaataaatttaatgattctgtttttgaaatgtctaaaaagggtaaatttgagactaattcagtaacagaatacgaaattactgaattaaagaaaaaattcgaaaatggtataaatatacaaacaaaagaatttttaattgaagctttgagtgttttatggtgtagatcaccatatttatttattaatttatttaaatcttatgattgtgatcttgaaagagttgacttatcaaataaattaattaaattattatgtagattatcatattcagatgtttcattattaatcacttcaaatgttccaccaatttgtttagatggtgttttgtcatttgttaatggtatatatgatagaattaaaattggtatggttgaaaatgttaatttagatgcatataccaaaaataatttattaattcaacagtataataaaaaatcagatttcatctcaagtgttcaaaaatggaatgaaaaaccagaaaaaggtttaatagcattacatgaaaaaggttttttaaatgatccaaatgatgataaagaagttgcattatttttatttactaattctggtagaattgataagaaaaaattaggtgaattattagcaaaaccgacaaaattaaatttattaaaagagtttgttggattattagatttcaaaaatttaagacctgatgaatctttaagaattttattaaattattttagattacctggtgaagcacaacaaatcgatagaattatctcaactttcaatgatagatacatccaatgtcaagattcaaatgatgaagcagatgaacaacccaagtcaaatggagatggagatgaagaggaagaagaaaaagttctacctgatgcagatgcaatgtttgttttatcattttcacttattatgttaaatactgatttacacaatccaaatattaaaaagccaatgactttagaagattatcaaagaaatttacgtggttgttatagaggtaagaatttccctgtttggtatactgaaaaaatgtacaatagtatcaaagagaaagaaattattatgcctgaggaacataaaggtacagcaaaatggtttgaaaatgtttggcattcattaattgcagaacaagaaagtaaaaaggcaaatgaattaaataattcaatatttgatgaattatggacaatagaaaatggttgtgatattggtgaattattatcatttgataaaattttatttcaaaataattacaaaaatctattaagtacattagttgtaatgtttgatgatgcaactaatgatagtgttataacaaagatgatgtcaactattgaaaaatgtgcagcaattgcaatttattttggattagaagaaatagttgattcaattattgaaattacagcacatttatcaactttaacaggtgttaagaaatcagaatttgcaaatgaaagtagagatattttaccattaattgaaattaacgatgagaatgataaattaaaatcaatctatgtttgtgatcttacaattttatttggtcgtgattatcgtgcacaattaagcatgattgtattattcagagttttgaaaagatataattataaagttacaaaaggttggtactattcaataaaggcaatcctaaaattatttgaagttggattaattgatccaaatatttttattgatttccaaaaatcattaaattttgaaagtttgaaaaaatctgaaccggaatataaattaaataaatctgatgtttttaaagataatggattattttcaactttttcctcttatttgaaagtattatctgctgaaactttggaaccaactcatgaagaaattgaaatttccatttatgcaattgattttgttaaaacacttaatatcaataacttattcctcaatgttttaagaaatactagtgatactgatagtatgaataaattagttcaaattttggttgcattattaccaaataaaaatgatcaaaccaatagatattacgttgatgaagtattattattattagaatcaattgttaattatttagttgtatccaaaaatcaaaaacttattcatcaagttataaataaatgtgattcattaattgaaaatgatactagtgaaatgaaaatgtcaacagtttgtagaattttatcatataaattaattttaatcaatgaaggattggttaagaatgaaaacaatataaaattattacattctacatttaataaaatcacctcatttactacatcatcaagagaatcatttattaaacatggttttagtattttaattccatttggagaacttaatacttaatgaagataattggtgttgtaaagaagttatatatgatagtcaatattggattattttaagaactattgcatcattaccaaagaatactaattatgtatttcaatttatttctaaaattgttaaagaacactcaaaattaattaattataacaattatatggatattttaggattattagatgaaatttcagcagttggtgcatatggtgcacaatgggaacatgaatatgataaattagttgatagtggacataaagttgaaaataaacaaaatccttatcaagaattagttaatattggattaaattctattactttgacaagtgaattaagcgatgttattttaaataataaaagtttccaagaatcaattaatgaaagaaatgaaaagggacaggaagttgtttcaccatggtatccattgattgaagcaatttcacatcaatgttataatccatgtagacaattaagaaatcatgcattaaatacattaagcaatttattaatttctagtaaaagtataccaattaatgaactatcattagataaaataatagatgcatcatgtttgagattattaattgaattgatgaaacctgaagttaatggtacagatgttaaaggtatgatcaaaactcaacgtgatgtaattggacttgcatgtaaaattattttaaatcatgatgaaattaagaaattaggaaatataattgaaaaaatatttgcattaactggtcaattaatacagaaaaacagaaacatctatccaaattctggtcatgaagatgaaataattgaaatgctacgtaatttattaatgattagaagtgcagatattgacttagttactttaaagggttataaaatggatagtgctttaaagaaagttgttgaacaagttattcaagaaactaaaaatcaagaaaagccaacaggtgaacctgaaccaaaaaaatagatttatcataaggtaagtcttattgtataaaatgtaaatgtatagtgaacctattaatatatttaaagaacaaacttattattatatatcaagaaatctcaaaaaatatttcaacagttttgttccgtatttttttcccaattctattattattttattagattactgaaatttattatattctctcttctgggcttatcttatctcctaatctccaattgacattagaggaaatactattatttaaaacgaaaaggaatgtttggttcagcagataattctcaaacaaatgcagaaccaatacccaatttaaacggctccggaaacggactctcaaatcgatctacgcaggtagtatctgcatcatctgcaagtatacgtgcattattattacaattaacatcaatatatattagaaccccagctaaattatttcgaccggcaagatttgattatctgacagttccaagaatgatatttgcaaatgaattagctggtaaaccctaccatattttcacacattcaagtcctgcaattttatatcaatcagtacgacgcttaggttggcaatttataccaaatcaagtattacctcctttaattgcaaattctgcaattggagttatattatattcaacatatcttacattattacaacattttacaactgatagaggatggacatggtcatatactggtgttaagggtaaaggtactgaacattggtattcatggatgttaacattttatgattcatttagagctggatttatagcaggtgcagttagtagtattgcagcaagtccaattgatgcattatattcacgttcaagttatgcagaattagttgatagtaatgttaaagatcaaggattatataaatatgcatggggtaaattaaagagtattggaatagttggtatatttgcaggtttttggcttaatttagttaaagaatcttttggatttggatcatattttgcagtttttgaagttgttaaaagtaaaggttatagttcaacaaagggagttattgattggttcgatagagtaagaggattagaaattgatccaaatgatgtcaataataggaaatctgcaaaagccttacaattaacatttgtactatttgcaggtgcatcagctgcaagtgcactgattggtattcaatatccacttagtaaaattcaaaaaattcatttagctagattagaggcattagatattttcaatgaaacaaacaaaataaagacttctaaatggtttaaactttattataattcatataaacaaacatttgatatattatgtgcacgtaagcttaaatctggtatgacatggccttcatttttgtataaaggttttacaagatatactttgactagtatacctgctacatctataggattacttgtctttgaaattacaagacaaaaactaacaattgaattacaagaagatttaaagggtactctagaggcttaatagacataaaataaattctataattcacttctttttttattattttcaatagatagatgatctatatacctatataccattattaattattaagcttttgtaaataagcatcccaaccagctttttgatatctaattgattgttcaattggatctctaccttgaccatataaacctctaccaacaataataatatcagtaccagttttaataacttcatcaacagttctatattgttgacctaaagcatcacctttatcatctaaaccaacaccaggagtcattataatccaatcaaaaccttcatctttaccacccatatctttttgagcaataaaaccaataacaaattctttatcagattttgcaatttcaacagttttttcagtatattcaccataagctaatgaaccctttgaagataattctgctaacattaataaacctcttggttcatcagttgtttcttgagctgcttgttttaaacctgatacgatacctgcaccagtaacaccatgagcattagtaatatcagcccatgaagcaatacggaaaacacctgatttatattgatttttaactgtattaccaatatcagcaaattttctatcttcaaaaataaggaaattatgttttttagctaattcctttaatggaataatagtaccttcatatgtgaaatctgaaattatatcaatatgagttttaacaagacaaatataaggaccaattttatctaaaattgataaaagttctgcagtatttgttatatcaagagaagcacaaagatttgtcttttttgcttccataatggaaaacaaacgtcttgcaacaggagagttgtgtgattgtgctctttcagcgtatgaagccatggttgtttgtctatcagataaacaactttcaacacaaattaaataaaaaaaaattattcaatttttgaaaataatgaaatattcatgtaatgaaagtgaaaaaaaaaattaaattacccgattgggaaagcagtctaagccaccgacgcatcgtccttaacattaaaaacatcagaacaccaattactataataaattgacattttgaaaaattcactgaaatttcaacttttaatgctatatattattaatgctttagggattggtaactggtttatacacaagttactactgtttgcattctatcagacatcaaataacaacaaaaaacacttataatggatcaacttaactataatgaacaacaacaatttcaaaagattgttgaacaaaagcaaatggctgatttcatgagactttatacatctcttgtcgatagatgttttaatgattgtgttaatgatttcacttctgaaaaacttactgatagagaaaattcatgtttaactaaatgtgcagaaaaattcttaaaacatagtgaaagagttggtactagattccaagaacaaaatcaaaaattaatgtcccaaatgagacaatagataaatagataatttaaactctttgcggattgatttcatctttacttacttgttcataatgatatataaatataaatattaataatataatattaatcaaaaatctattgttgattgtctttttataactgtttaagaaatatttcaaagttatattatacactaaatttacatattaatttctagtactcttctatacctaccaatgtctgattcaatagtattcaaatctaattttattgaatgattcctttgtagatcctgtagttcctaagagtcatatcactatatcaaatattctccttcagcatgtcaattaaactattccattctttcatcatatctaatatactttcataaatatcaccatcacttgtatcattatacataatcgcattagtaaacattatttgcatatttaattccagttcttcaattgtagttattttaccactcttaatcatacgtacaatatttttcaaatcaattggcttcttgataagttcataatattctggttcttcatctttattaacaggatgaagaaacatcgatgcaattctatgagatgaaatattagttattaattgtgttgataattgaaggaatttcttacttaatatagggtcacctgattcctttgtatctttattgtccttttctttcaaatcttcatctttaatgtctttatctttagtatcaagttcatcgttcttctcattttctttctccttttctttctccttttctttctccttttctgattctattatactacttcttcttgttctaggcctggtttgaactacaggcttctgttcaagttcgacatcaacttttggttctacaaccacttccttttctgcttgtttcatttttttaggagatttctctacttcttcttcaagtttatgtttaacagcagaacgtgttttatgtgcaatattttcatcatccttttcttgtttctcctttattttatcagtatcttccactatctcagatatagtttcagttgcatctacaaaaacatctttcttttcgtcttcactaacttgtaaattattattatcatcatctttagtttccttattaatatcctttatgttttccttgacattttccgtgattatttgtttactatgttcctttacattttccttcacaatctccttattcttctccactacagcatctttcttctccactataggatccaccttaacattaaccttttcggactctttattctctacaggtgtcacagatggagaaatcgatttatcagttaattttttattggaagtaccagtacttctctttcgtttcaaatcttttaaaaattcttcatataatacactatcatccattttaccattttcaatatcagttatctctaatttcttagctttccatttcgtctctaattcatcaacttcctttaaagcagtatttttataagaatttaataatttaattaatctatccttaacaaaatttaaatcaataaatttacttaatttaaataacattgtattaggtacttgttgtataacttgttcatttctacccctttcatctctcagtgttaaagattcagttaaaatttgaattaattgaacaggactaacaggtcctttattattattatgatttgtattaagataacctgcaacatctaaaaaatcaaaatcaggattaactaaaggatttgaattaatcattctctgtaattgaattatattaaagctaacatcttttttctcagtttgttgtgcagctgccatatacagactataaatatgttgtaatgtaacaattttttgcagtggagtaattctatcatacagttcttgcatttcctgtgctgttggcatctttgaaggtctcgcacgaggtttaacagcattggtattagcattagcagcagcagcaccagtagcagtagtagcatttgtggtattagcagttggagcagtagtagtagctgccgcagcagcaggtttcccactcattatatctatctcccttactgattgcaaaggaagtagtatattaataatcaccttaaagagtttgcaaattggaaaatcatgaaaatttgatgatgtaaacaaatttgaggctcattactttttttgtttcttttgctaccacttctttctttctgcatcaattagttttgatcaactgggggataatggcatggcgaagttagttgttgttattattatagctctactatacagttatttaacttctatatataattgattagtcaaagtcgaaacatcaattttacaaatgctatcttttttttaaaagatagcatcttgatttagtttctgaatctaaatttaaaaagatattgcagtatcttttgtgcttttgtgttggttgaaaaaccaagttactgatgaaaccatgcatggcctttttaaataataaaggtgcaacatttttgaaattttgctttcttttattgaccaactgtttaaaactttcagatcaactgaggtggtttggtttagatgggaagtgattattctggaccagttaaaataacatatacaatattttatgcaatttataatcatggaaatcatcagagtaataagctttacaagtttcatcatcacttaacttgaatttgaatttatttaaaacagcatcaacagtgtcacaaccaaagggtctatcatttagattgagcaatttagataatttgagtttcatattatttaaaaactttggtttccaataaggcatcattggtgaatcgtccttatcataagtaattaaactcatttgaaaattgccacaaacacttttaggatcaaagaattgaaggcgatattgataatttgcttcagaaaatccccaaattttgacaggaaagagttagtgataaacacaataacatttttatatcttgaccaatgtataaagctttataagttaacttctgttctaacaagttatgtatgcatgtatttcaaagttgaatattaaaataatgtatttgaccttgtacttgtttttactcttgtaatttcttctataattggctccatctaaacaaagtcagtcatatagactatcacgaggtttacagagatacaaggtgtaaaaagaaggacaaaacatagatacaaagaagaagaaagaagtgaaagcaaagaaagaaaagagcaaaaatggatgagccttctaactaaaatacctgggaggtagtgagcaatccaatatcaaatagaagctgactatctacaagttaaattacgatatatagaacagatgtatgtattattgttttataaatttaaaataatagatagattgtctaaaaaaaaggaagtttgttttaatcaaacaagagtatcatttggtaaaattcgtggttttaaaatccaataacaagcttcaattgttaattcacatgactattgaagcgaggcactgaacaccttcttattgatagtggagctatgcatactgcaactccattaaaacattatttgcatggtttcgtgcctgaggtgtttaaaattgttgatttccatggtgacaaaaatgatgctttaggctatggttatttattgcttaaatttggtagcaaagttgtaaaattcgttgcttactatgttccggattgtgcagaaacacttatttctgagtacgatcttctagatgctaattttaattttcgaatagtatcaaggatcttcaatcgttgtcaagaacatgtcattcaacgaccaaatttatccattaatgactatcaatagaacattctatatcaataagtcacacattattccatctacttcaccaacattctcatcttatccccaactacgtatcaaatcattacacatttaatttggctcatgtaaatgcaagatccattctagactcggtaaaacatttgctgctgttcctgaaatgttgctccctggtttaagatcactgctcaccgataccgattgttcttcttgtcctattagcaaaagcaagaagagcaaatgctattgaacaaagtcatgataagtatattgatggtgttaagttttcaactgtttcaactgatgtatgtcaaattataagaccttttcaacctgacagaccagaatattttatttcatttaagtgtaatacttctggttatgtaatgatttatccaatcactggtaaaaatgctgtttatgatgctattaaacaatatgttcattgggtatctactcaatttggtaaggtggtaaaatcattcttttgtgatcaaggtacagaatattttaataaaaatgtattaacattctttaatgattccggtattgaattacattatacctctggttatacccccctgcgaacggtgttgctgaacgtctcaatttaacaatcctcaatgatgttcgcgctatgttaattcatgctggtctaccttcccaatcctggcctgaggctgctcaatattcggtgcttattagaaaccacatctattcatctaagctaaaacaatcacccgctgtttcgttgggtattcattccatataatccaactgatcttacttatatggtaaataaagacatatttccaattgataataaactcttgtattgatatacttccataattcaaatatggttgcttaaagattaaacatcaccatccttatgatgcccgtgcaaatgcaaaaaagtcttacctcactgatagcggtgccatcatcacctaaaacagcgctaaatcagtggaagaatcttacaatatttgaatgaagcgtagccataaaaagccaccctccgatgacttcaataactgcgttattctaagagagaacaaaagacccaaaagacagcaacatgcaataaaactggaaactcaaaccaatttaaaattaggcagtcatttcaaaaatttttttctcacccgcccactcttatattattttattaggtaatctctgcaattggaatacttccactttgatgaaactctttctttacagtattcacaaagtatacgtatatcacccaatatgaacacagagacagaccaaaaggatgctgaacacatctcagaggaaactatatctaagacattatcactgccacagttctaccctctctctacatcttctaagcaaaagttaaaacaaatacaacctcaatccaaaactacctataacgactagatttattcaaccttatcttgatgaaattaaggactcaataatggaaagtatcagtatacaactagagattgcagcacaaaagtttcaagctggtcttatagatgaaaacacctataatgaaactaaaaacattatatacaaggacgcgtcatctactgactatactgaaggtatacgtgacgcgttcaatcaatactctctatcatctgatgcttattcattattcttaacagctattttcaaaaaaaattcacaaaccttggatatcagtaatctatactgattatgtatcgaatgaaaaggaattattaaaaaataatccaaatagtcagaaaactctcattgaagatttccagtttaatttcgataatttatcagtctcaaaataattcacctcttaagaaggaaatagctaaagtatcgaataatttacagcaatttatatttatatcagtatatcctgaaaatccattaccctcaaaattaacaaacgatggtaatgtagatgatgatgatgatgatttagaggttgaaggtggtaaagttaatttaacttgtccaatttcaagagaaatcttcgttagacctgttaaaaatacaaattgcccccatacatatggtttggacgccttgaaaatttatcttcgttcatcaagggaatgtccagaatgtggtgttgccgtatcattatcagatgtaagagctgataaaattatggaagtaagagtgaaatgttacaatagagataaaaaattaaatgaattaattaaggatagatttgttgatgaaactgataaattataattatataaatctgtctatttgtactttgctttcaatatatctccttttactatcgtgtaatggaattaatttatcattactgtttattacattatactataccatactatactatacaactaaaatattatttttaaaaatacaaaatacaaaaaaaacaccaaaattaagtgtcttcaaacgtcaaaccaacatcttgttggccaaaaacctccaacttgtcccataacaacattaccacgttctaacaaccaatcaacaatctttttaacttcaaatggttctagtaatggatacattcttgaacataaaatatcaagtggtgtaccaggatttgaaacaatactccatagtataacaaataaacatttattccatagtttactattaaaatcaccacgcaaatcaatccataaatatgaacatggtgaatcaattggtggtggaacttttttagcaataatatcttcattattgtctttatggaaattactaatcaaaaaatcagattcaaatttactacgatcaattgattttgtgtaatatgtatttaatgtatccaattttctatcaattctagtaaccttaatatctccactgataaataattcaaacaatggtgcatatgaaccacttggacattttggtgaaagtaataatccatttgaatctttactagaaacatcgtctaatagttcaatgattttatttgaactactgataaattcttcattcaatttacaatctaatgctaaaaataatttatcagttagtgtaaatttaatttttgaaccttcacctaagaatgcaatcgccttttgatcttccaaatcagttaatgcttcagcatataattcctttggtatatcttcaaacaaatcacgtacacattttgcatcaaatttctccttattcgtagcaaaaaatgcctttaatttggtcttggcaaattgtaatgatgttggctcatcacattctttaataaccttagcttgttctgtatcttcatcgttagaatacataaaatttctattagtccataattcttccttttcaatcattgaaatcgtttctctataaacatcgaatcctgtttccttctttaacggtttgaatactcgtccttggaaattttcttcatatgttttagcagcatcattttgtgaattgtttaagaaaatatcagctccaacactcttccataagtctaacattttgaatatatcataatttattaattcttcagaactaactaatctatttttaactgcatcaattcaaaacattttcccaattctttttagcaactaaaagatttctagatcctaacattttcttatattttggccattgtcttttcaacaagtcagctgaatattgatcttctaaaaccaatgaaactttaggccagaatatattaccacttaaagctaaggattgggtaatgatcgcagctttaattaacaatagaatatgctcattagtaatttgaatagaaactctgatcttcttaaatgccttggcaacacgtgaatatgatttacttgaaattttgtgtttcttacgttttctatcatccattaatggttcaaaaacatctgtagtatcatcagtcatgtgtttcatcgccttcaccttcatccatttcaacatcaccatcatcatcagcattatcatcatcaagtggattagtattattaaattcactatcattgtcactaccttctccatcaacaccattttcatcatctttctcatcgattccaagaattcttgcctttctacttgtacgttttctcttacctgtattctctgtagattcctttcaatttattgatagcatgttgtaatctagcttccttattagggaatttccaacctctcgttagcgaatctttgttattgatggtaatattatcaagttgaacagtacttgtaaatttcctaaatttgaccttataatcacctacaagacactttacttacttcttcctctgttggaggatttttcacagatttagcaacaattctacctccttctacacgttcaatttcaattaagtttttggattctagtgcttccgcatcattcaccattgtacgacgtgcaatcgtgtatgctaattttaagattttagataatctatcacagaacgttgtattcaaacaaacacatttatcttcatcaataacttcagatagtttttttcttctgaactcaggaccatagtctaatgtcgagaaatcaaatttaccccttcttgatgatggtggttccgaactaatagttgtattttcaattataccattatcaaaattactgtcaaacgttttatccttttcagtattatcctaaaggttgttcatttgtaatattgttagattgaaattgtaaaaagaaattggtatcagtttcatcagaaccaacatcaatattattattgaatacttcctcatttgatcgagaggttattatttcttcattaaacttattgatattttcaatctttgcatcatggaaacttttgtatgctgctaaatctttcttaacagctgtaagtttacccttactaacatttaacgaaatccattcatttgatgatttataagtacctctaaagaaaggagtgataggaacgctttcaattcgccgaggtaccacacttaccgctataccctttaggaaccataaagactctattgctttgtgttctattatcataaagagaagcatatcttacttttcttctgtctgtagatgaacttccatacaacatatgttcttcaaaaagtgatctaggtgaagcttcaactgtttctatttcttctatcgacccaataggtttataactaggatcatttttatttaaataatcttgagttgtaaatctgttgtatttcattttaccagaatgaaaaatctgagcgactatagcatctggatcagaaggatcaggtttggtaatagaaatattttcaagaatacttgcaatttgtttaacatgatatgaacctgttaattcatcatctaaatttgcaattgccatacccggattcagcttaatcatatcatatatttgattggtaagtggtaaaaatctgttgaatttacaattattagtttcttcttcttcttcttctcttcttcattaccttctaaaccgtttgttatatctgcatcatccttcttagagccaaatccactatcttttaaagattccattaaagtaggcagtttattaacatctgggaatgtctcaaccaatcgaactgcagcaaaaaatcttttcatttctttatgctcaacctgaattaactcaacaagaccaattttgactaatattctaataattctattgaaagcacgaactttcatgattggttgagtctttttaacttcaacatataaatctttggttaatctaattttgttttctgcagcttcaagtgcagcacccacatatgccatagctgcatattggtcataataattttcatttggaatgtgtggttcaccactatcaggatttaatgaatttttctttgagaatctgaaatgtgtcatatgattagagtttgatttttgaacacaaactgcaactttagtaattaacatatttttttcaagtaagttcaatctagttgttaaagaacgtgaatcttgaccagattctttgatcaaatcaatcgaattgatacccttttccttatatttagctataattctaatcaattcatatggctttttacctaaaatgttatttttaaatgagcaactagccaaatatagcgattgataatcttcactcatctttaaaatgtatgaactacaaaatgaattgtcaaagaaatcatcaaatggagggagtgcttgatttatcaacagacaccaaattataacttttatcatcattctttaccgttagattttgttttcttaaccttacttttcgttttattattattttcagcttcagaatcatcaattttccaaacttgaaaatctttgttttctaataaccataaccatataacagttttggtgaattgatccaataataacggtttaccatcactttgactattatgggatgcaacgaaattccaaaattctgaaccattgattccgctaaaatcataagtagcaagtccaacaagcgtttcttcaaaaatagcagtcggtgatagtccaataccaggcatattcccttgttatctttaagttgttttccttcacaatagagtatacccccctacaggaaaagacaaccatcctgaagttgaaaacaacaccacaaaaattcagttttctcagccactgctttacgtaatctcacagtttactactagttaaaatacatcgatactacacaattattattgtacatgtccagttaatgatacgatatgatatgatatgatactgatatgacacattatatagagttagtctacatatgattaaaatgtttggccattcttttgttcccaatacaaacgtttgtctgttttattcactgcaaatgctgattttttggcaacaggattagcattggtatttttgttttcgtctttttcatcttctgaatcggagaaatctggttccttaactgggatagtccccgttattggttcaggtgtgtagtcatcatctccactatcaggtagagacagaatttctgaagttttcttactattggagacttgatttttagtctttctttgaattcttatttccactatttttatcctgatttttgtgactgtataaatctatttgcatcatcttctgaatcatcctctgaatagaatgaatcagacatatagtattcatcgggatcaagccctgctttctcagatggtaatggaggcattatagtaccagttttcttaactataggtttattactattattgttttttttattagtttgattgttggctccactagcggcatgaaatgcaacattttgaacatgtcctcttgcatcgacaaaatctctttgtttacccttgtatttgaattataccacctaaaatcgattgtcccaaacgttgtttataagttgcataatttaattcataacatctattaactaaaagttcaaaagcaccaccgaaagcacgtttaatatctctcagattaaatgaaccacgtgaaatattgtttcgaagaatcatgaggatcttgaattgctaaaaggaatggatttcttccaattcaattctggatttgaatttttatttatgtaaattggttccatttgtgatgtaaaagcaatggcaacgtcatcatatccaaaattatatccatataattcaaaaaattcaattaataaacaacctaaagttctctaaaggatcaatgttattagtaggataatcttggatgaagtttaaggaatgaataacataaacaaatgattgaaaatcctcccaatccaccaacatgaacttcatttaattttcttactgataaaaattgtttaacaaccagaactaattcacgtaaccctggagtcttattcaaccaatcaatgaatcaatttagcagcagttaaaccatttttcctttcaaacgatatatcaatatggattccttgtttttaggatcaacaaatttaataattggaactttagcctttgcaattggtgtcacttcaatacctaagccatgatttctaatatatgatgtaagttgatataatgaacttttattatcatatctacctcttggagaaacaacgacacaatcaatatctgatcctggtaagtataaatcatgtagcaaatgatccaaaacaatgtaattcaggcatctggccatatagatgaaatagtgactccttaagttcttaataaggttgtttctagcattgaatttcctcaactgatggtgatatatatttaacgaaaatccttgatttcatgagttaaccaatcactaatttctctttcctttgaatgatcactattcctgatccatgggaattcatcattaacagttcccggtttgtgttttgtacttttagagtgataacttccttcatcattacttagatactcattttcatcatcataactgtcatcactattaattgtatgtactggattcctcattcttcttttaattcatcatcatcatcatctgaaaagttaaactctataaaatcatttcccattgtatccttttcaggtttcttttgatcctgaattcatcttccatatcttcatcttcatcatcagatttagattcatcagtcggaggaatcctgaggctgaaatattttcaggatcaatcacttcactttcatcaccactatcagaatccaacaatacaatatctttatcaccattggtagcttcgttatttccagtctctatcacatcatcatcatcatcagaatcagatgcttcagagaccactacaatttcatcatcatcagaatcatccgcattattatcattgttattgttttcaacactatcactactgttaatttcattaagttttgaatatgtattttcctttttagttattataccattatctttatcagcttttgacttcttattacgtgctttatcctttgccttatcctttgctttagcctttttactctttttctgaggaacaataacagaattgggtcccatttgtaaactgttctttcttgaatttgaaccagaattagatttagtcatattacttgttttgactttattcttattagacttaggattttttctcctttctgggatccttcccatttttgttgcccttactagactgagtccccattatctatctttgtctatctatattagactatacctacaccaacagatcttgtcttctctccagcagaagaagtgaaaaaaaatttagtatggaaaccaaaaatttaaatttcactaagagagtctctgtcgctgtttccatcactgcttaaattatagtactttgccctccattggatctctctgcatcttgatcatatttgattaaatagacattagacaaatagatacatcacaatggctgatagatactctttttctcttacgactttctctccttcaggaaaattaaagcaaatcgaacatgcccttgcagcctgttaatcaaggtgttacatcattaggtattaaggcaactaatggtattgttttagcaactgaaaggaaaaatacatcaatattagtcaattcagactttatagagaaaatttcacaaattacacctgatattggaatgacatattcaggaatgggaccagattttagaattttaatggataaatcaagaaaagtttcacatacaaaatataaaagaatttataatgaatatccaccaactaaaatcatggtttcacatgttgcagaacttatgcaagaagctactcaaagcgcaggtgttagaccttatggtgtatctttattagttggtggttatgatgaaaatagtggatttatgctttatcaagttgatccatcaggttcttatttcccatggaaggcaactgcaattggtaaaggttcaaattctgcaaagactttcttagagaagagatggaatgatgaattagaattagaggatgctatacatattgcattactaacgttgaaggaatcaattgaaggtgatatgaatggtgataatgttgaaatatcaattattggtaatactaatgatgatatgctgggatttcaaggtgctgaaggtgtctcaggtcctcgtttccgtaaattaactccacaagaaatcaatgatagattagattctttgtaatatcttttcttaatcataactctacgattgtgtatctttgttaatatataatataaactcaacttctggtagtcattaaagtagtttgtacatatatgttcttaaagaaattacagtgataatatgcttaaataaagcaaataacttctttccacggtatattagccctctgcggcatcaacttttgatactacggacgcccttcactgtgtaatttttctttataataatgttaatatctttttatgcatggcttcattcatttctaactttgatgataactaagaatatagtatctaaacaatctattatcatgtcatcatctgcattgaaacaagctcaaggatttttagactttgtcaatcaatcaccaactccttatcatgttgttcatacggttaaatctaagcttaaagataacggatttacagaattatcagaacgtgataactgggcaggattgattaaaaagaattctaaatattttgtcacacgtaatgcaagttcaattattgcatttgcagttggtggtaattatgtaccaggtaatggattttcaatggttggtggtcataccgattcaccagttttaagaattaaaccaatttcaaaacaatcaaaggaaggttatcatcaaataggtgttgaaacttatggtggtggtatttggcatacttggtttgatagagatttaagtattgcaggtagagtttttgttaattatccagaatctggtaaatgtgttgctaaattagttaaaatcgataaacctttattacgtattccaacattagcaattcatttaacaaaggatagatatactaaatttgaatttaacaaggaatctcaattcaaaccaattgcaggtatagttaaaaatgataaaaatgaaactactgaaacaaatgaatcatctggttgttgtaaaggtgaggatttaagtgatgaacaatttgaatctgttaaatcatcagttgaaagacataataaagagttattagatttaattgcaaaagaattatctattgaacctttacaaattgaagattttgaattagttttgtatgatacacaaccttcatgtttgggtggattaaatgatgaatttattttctccccaagacttgataatcaagttacctgttactgtgcaaccgatgcaattgttaaagcttcaactgatgataaattatctaacaattcaggtatccaattaatttcattattcgaccacgaagaaattggttcattatctgctcaaggtgccgattcatcatttctcccaaacattattgaaagattaactaaattaactgcaaacccagaagttgatttaaagagtgaattaccaaactcttatcttttaaccactatggctaaatcttttatgatttcatctgatatggctcacggtgttaatccaaattattcagaaatccatgaagcatataacaaaccacaccttaatgatggtccagttattaaagttaacgcaaaccaaagatatgttacaaattctgctggtattgttttattgaagaaaattggtaacctttcacgtgttcctcttcaacttttcgttgttcgtaatgattctccatgtggttcaactattggtccaatgatcagtgctaaacttggtcttagaacattagatttaggtaatcctcaattgagtatgcactcaattagagaaacttgtggttctgcagatattgaaaaattagtttctttatttgaatcatatttcgaacattttaattcaattgaagattctatctttgttgatggtgttgacaattaatttcaagaaaaacttagttaatagacgtgcccattaaataattttatttataacttgaattattctttacgtgtaaggtggtaaccctctatataaaaatccccctcagtgatccaaattttagtgctaacattcaattccttccgagctcgagctacacgtcactctttaagtgtttaggttgtttaaagagacaatataatcaatcaatgcagttgacatacctaatactaatactcgtacatttatgcacaacgtttggggcaaaagtgaacacatccccagcacttttcatgtcatataatttaattccaggcttgaaaaccatcattgaaacataccgaacaacttccatttacagagaaagaaaccgatttataccttacaagagctttagaacaatgctcaagtgaacattatatttttgttaaaggtcccaggattaactgttcaagacttttcaagtttcccattatggcaccaccttagagctagattaagtgatgcaagtacgtttttgagcatgccacatatattggattctagaggtgttgcaatgcatggatctagagattctcattcagttattgactggggacatctagaaaaagtgttagatgaagaatgtcatgtctctaaatatcaattaaatacaatggattatgaggaaatgccattagttatacatactcaaaaaactttagttaatataaatatacccaattttctcaatcttaaacatgaagaaggtagtgaaggtttccaatatagagatcaatttattgaacgtctagatgagttgatcagacatgtttgtatgaaatttcctacacctaaagttacagtgcttataggaagtatgaattcagaagaatacgacactaaggagatttcaaacgtagaggaggtgatattatacaatgatttacctgatgatccaactgtgttaagtgttgaattgagagataaagccaaaaatagtaatagatacattttcccagatatcacagttttcgataagagtagatactacgaaattgagagacacgaatcaagagaaagaagaatcttggatgaattgaaggataatcaatgggctaaagatctaggtaaagagaaaccatcaactgatggtttagttgaagatgacacatggttagagaaaaaggaaaagaaagttgacaaacacttaccaggtctcagatatggtgaaaacgaagagtttcattcagcatttgaaaatgaacagtttataaaagataatgctttggtgatagcttcttgtgtgattcttgtgttatcagtaatttttattgatactatcaaattgataattaaatttcttgcaagagttttcaagaattcagttaaaccaaagaagcccaaaaccaacataaagaaaactaaatcaaccaagaaggattagtgtatttatttgtatcgtaattgaataaataaacgtatagattaccagtaacattttttataaaatatttctgctgatgttggcatcgacatttgttaaaaaatatttttactatgggaagaccattatcatcttgatctcctttcatcctaaataacaatcgcatcatagaacaacatacatgctaaatacagcacaaaaactgaataggtccctaatatcacatgggatacaagcccgtttcatttcaaaactagctcataggattaacatatcgggaagaagttaaacatgcaattaactccaatattccagtagttgcattagaatcaacaatcatcacacacggtcttccatatcctgaaaatattggtatggcaaagaccgtagaatctttaataagagataatggatgtgttccagctacaattgcatttgttaaaggtatgccaacagttggtgtgaactcagaacatcttgaaatattaggattaccggacattcacaatgtgaaaatatctagacgtgatatacccaatgttatggcacgtaaacttacaggaggaactacaattgcatcaactatgatgttagcaaatattgctggaattgatgtgttttcaactggtggattgggtggtgttagtagaccatggacactatctgacgtaagtgccgatcttgatgaattgggaaaaactgcagttgctgttgtttgttcaggtcctaaaagtattttagatatacaacgtacgatggaatatttagagacaaaaggtgtgcctgtttcgacatatgttgatgaagcaatgagaagtaaaattgatccgtatgttttacagagaatcgaaaatattcaaagagaatcaaatagtgatgcaagaagtttaaatgaaattggaaagttttgggatttacagaaatataatgtcccaggattttatgttagagattcaggtgtaagaagtccatttgtttgggaaaatccaagaattgcagctgatatgatttataatgggaaatatagaatggaaatggaaaatggttatgtcttctgtgctccagcgccgatagaggttgctttagataaaaccataatggatgaaattattgatgaagcattacaattagctgaacaatttaatgttacaggtaaagaattaacaccatttttgttgcaaactttatatgaaaagactaatggtaagagtgcaaaggttaatgtagaatttgtgaagaataatgcaattttgggatctaaaattgcagctgagttgtcaaatttgaagagtgaagcaccatctttatttcaaccttccaatttagaagaaaaaactgaaattaataatacaaaacctttgatcgaatcaaagccaaaacttgccgaaacaatagttgtcggctctgttgcagttgatacaatgtgccgtattatcaataacccacctttaatgaatgattcaaatcccggcaagattatggacagtaaaattggtggtgttggattcaacactgcattagcagcaagtcgttcaaatacaggtagctctattatgttaataacggccattaataaaaatgatgtatctggtaaacttatattgtctaaaatgaaagaattcaacatgtcatctgaaggattaattaatatctccaatgaaaatacagcacaatatatttcaatgcatgatactaatggtaatttagtagttgcgtgtgcagatatggatattattacaaaaattccatcaaatagcgtgctcaaaaagattgaagaacataaacctaaatacatactattagacatgaatatctcatctgagctagcagatgatattttccttaaagctatggaacttgatattaaaattatggttgaaccaacatctggtgttaaatgttcaaaaattggattatgtaatttatccgtttttccacaaactcctgttgaactattaactccaacaattgatgaattagccataatacacgcttcccttgcaaaaaatgggaaatttgaagatattgataggtggttcactgttttagatgcattaggaattgatagtcaactaagagaaagacttgttatggcttctagaaaattccctttattagaaaaataccttcaaaaaggtgttttccaacaagcattccaacttttaccatatttcccacgtttagtcattaaggatggatcaaatggagttttagttgtacaaattgaaaccaaggaaccgaaaactgtatcttttaatggaagtgatttccatattgtaaacactggtagtagacatggacttttcctttcaattgcacattatcctgcctttaaagtaaacgaatctgatattgttaacgtaacaggtgcgggtgatacactagcgggatatttactttctaaaggactttcagtggatggtaagagtattcaagaagcacagaaatgggcagcagcagccgtgtgcagtccagacgctgttcccaacatataacacttcctaatcgggtaatatatagataaatacactgtatagattatattctgtataaaaattcatgttaacgagcggcaccttacataataaattttcaaatttcactgttctgtactgctttgggcgaaaggtcttgaggagcggaacgaaaaaacaccaaattaatgagatgcacccaacatgattttcattttaaaagaatttgatttaaacagtgattattattttacttttttgttgaaaacttcttttatttcttcctttggcgtcttgcttcttccaaaactataaacaatgactatggaattacctcgtggtagagtggaaactttaactgatgatcaagaacatgttcttaaacaagtttggatgtatattttacatttcacaggatataaaattcaacctccaggacctcttgtaagtagttcaaaatcaagatcaagtactgtctcacatgaaaaggaaaaggaaaaagaaaagaaaggtggtttatttagtaaattaaagcgtaataaacattcaaaggaaaaggatcatcaagaattgagcagaacattatccaatcaatctgcaattgatccaaatgtaaaacattcaacagatattaaagttcatgaagctttacgttcattagatacaattaatgcagagagagctttttgggatgcattacgtcaagattcaccagataatttcttattaagatttgtacgtgcaagaaaatgggatattgataatacattattgatgttatcacactcaattgaatggcgtgtaaaggaaagtaaagttgatgaagttgttagaaatggtgaattagcatgtttagagaaaaagcaagaaggtgtcatcaagcaatttaaatcaggtaaatgtattattcgtggtagagataaaaagaacagaccaatcgttattgttagaccaagatatcatcatagttctgaacaaacatttgaagaaattgaaattttcacattacttcttattgaatatgcaagactgatgttaaatgaacctattgatcaatgtacattaatttttgatttaactggttttacaatgtcaaatatggattatgaacctgttaaatatatgattaaagcattcgaagctcattatcctgaatctttaggtattttattgattcataatgcaccatggattttcaatggtatttggcaaattgttaaaaattggttagatccagtcgttgcatctaaaatcaattttactaaaaataccaaagatttagaaaaatatattgatgcagatcaaatacttaaagaattaggtggtcaagatgattataaatatgaatatttattaccaactaagaaagataatggattagctataaatgatgaagaaattattaaaaagtcaatcgctgaaagaaaagacttagaaaaacaattcattgaaaagaccattcaatggatagagtctaaggatatcacaacttcaaaacaattattacaagaaagaatttcattaagtagaaaacttactgaaaattttaaaacctttgatggttgtgtgagaaacagggggttgtatgacagacttggtgatatcaagttttaagaacgatttcagtgaccaaataaatgaagaaaaattaataaaccagtaaataatcaaataattttaaaaaactttaaaaaaatgaaatccaaggttcatattcaggattaccgatgatcaaaaacatttaatgaacaattttataatcacttacgatataaatttcttataatttgtataatattaatatgacatagtaataaaaaaattcgtaataagaagtagaaaaagaaataaaagtgttaatgaatacgatatataatacaggttaaaaagttgaaaaaagagtataattaaacaacaaaggaaagaggaacgtctctcaaaatttaatctgattttgcagattgtttcttattatattcatccaaaactgattctttagtttgtaatgttggtgaggatacttgttgagattgggttgatgattcggttggtttttccttaacggataaaattcttttaccccagttaccagcagcggtattacctgtttcatctctacattgttttaagaatggtaataaagcggtaccaccagtacctctcaatacattatcctttgattgatttgaacctgctaaaccagctcttaatgtatttttttgtaaattatcagaacccatattattttccttacgagattgaatgacaatataacgagtaacaattctaatatgtttatctctaaaagatttaagcattgcaacgcttgcatcatatgctaatactaattcattatgctttgctttatttttcataacaaaatcacggataacattaacttttgctaaatgttctaagaaatcggaatgtttacctggcatatattttctcatttcagccataaatggattatcagaacctttattttcttccgattccccagttgcattatgatcaacatttaaaattaaatctaatgtttgaatcgatgatgattgtgcatttgatcccccacttaatattcttggttccgtttcatcaccataatatacaccgtcaggtaatccggcactactcatattcttccatccagctaaatatggtctgagtctaaaatagaaaacatgaggatcacacatttcttccattttcattaaaacactacctaaataatcaatactttccgctagttgttttaaacattcggtaaccttagcaacattattatctcttgcatattgaattgcatctaaacctaactttatacatggagcacatctatattcaaaatagacacttaccaaatagaaccaagattcatcaattgatcctgtataagtatttatagtttgtaaattatctaagaatgaatcatcatcatttaaagttgcttcgtcgaatggtaaaatttctttccaattccatagacataaacctgcatatgttgcaataggtggtattcttaatttttcagatactttaacccaaggatctgcgatttgctttggtagtttattagttggagtatcaacaccccatatataggcatgagctaaaaaacctaaaactgaataagctctacgatattgttcctctgattgtaaatgtgataagtcaaggcattcaaatttatcaataactgatctaattcttttagttaataataatgcaggtaacacattgactgtattttcccatatatcgtaatatgctggtaatctagccacaggaagtgtttctggtaagaatccggtctttggagagacatcataatcttttaattgtggcagtgggtaagtataggacataatgtttatttgccaaatgagccagtggtataagcagctgatagaggaagaacagaaagagaaaagaaagaagaaatcggagaagtcggattgtgaaatatctcaattatgacttgactgttgaattaataataatattttttcatgtcatgccattaatactagaaaatattttttatttccggtcaacgagccccgctccactgggtttcattaacgacaggaaatttgttgttgttgactacatgtttttcttggttcttccacttttcgttgccactggtgggaagatattcacggcgtttctcatattggaataacggtacaacaatgacttctgatactgagaacttggatatattggattctacagccttgataccccctaaacgtacaactgaaccccttttcacggctagtagtattgtaccaggatctaaagtgtttgtacttaaggatgataattatagactatcagagatactggctttccaagtacgaagaggtaaaccatcatattatgttcattatgttgaattcaataaaagattggatgaatggacattagaagaaaatatagattttcacagacctttagtattacctaaggctcaatcaccaaagaaagatacaaagaaacaaaagaagaaaactcctgctagtagtgtgcccagtagtagatctcaactgagtagtactcctattgaatcagatcgtcaaatgtctgtgaaaactgaagataaaatggatgaagatgataatgataatggtgataatgatgatgaaatggatttagataatttaaatgttcaaggtttggtgaaggaaggtgaagaattaagtagagaggatgaaattaaaaaacttagaactagtggttcaatgactcaaaataatgttaatgctttagctaaaattagaaattttacaaatattattattggtaatcatgaagttgaaccctggtatttctcaccttatccaatcgaatatactgacgaaggttctttattcatatgtgatttttctttacaatattttggatcgaaaaagcagtttgaaagattccgatctaaatgtactttaaaacatccaccgggtaatgagatttatcgtgatgaaaaagtttcattctttgaaattgatggacgaaatcaaagaacttggtgcagaaatttatgtttactttctaaattattccttgatcataaaactttatactatgatgttgaccctttccttttttattgtatgacaagaagagatgaattaggtcatcatttagttggttatttctcaaaggaaaaggaaagtgccgatggttataatgttgcttgtattttaactcttcctcaatatcaaagacatggttatggtaaattattaattcaattttcttacatgttatctgaaagagaaggaaaaaatggatcacctgaaaaacctttatcagatttgggtttactatcatatagagcttattgggctgaaacaattgcagctttacttattgaaactaagcctgcggagataagtgttgaagaaatttcccagaaaacttccatgacaaccactgatattttacatactttacaaacaatgaatatgttaagatattacaaaggtcaacatattatttgtattactgaccaagtggctcaagctcatgataaattaaagaaaaagaaaaaacatcagctagatccgaagaagcttatctggaaaccacctgtttttcactgcatctcagttgagatttggatggtaatcaaaattttaatagtttacgaacaagaaaattattatgtaaaatatgtacactaatctaatcatattcagaatttaataaagcaattattttcattatgttttattataataaatatttgataaagttaatgatgtatcatttatttattgttaattaaaacaatttgttatgtttcattaatttttgaaactaacacatcatgatctaaaaatctcaaaatttcaaaaatttcctttttgagaaactttaatggctacctttggttactatcattaatatagctagaccatccattttacaatgttccactactgaattattactataaataaagctcgttttctgcctagttcaataaactccaaatcctctttttctgtctacatcacaaaacaaataaacaaacaaaacctaaattaacaaaaatgaattctaaagttgcagctactcaaaacaaaccaaccgatgacaaccaagatgctgataccttggggttacatgtgtactttaaacactaacatgtgtacttgtaccattgcttaagggacccaattaaattaacagatatacatttataacaattttattattttactcgtttatagttatttcaacttatttaatttaatcttcatcatacaaaaagttcatttaacgatatcaaaaatctttatgcgtaaatatctaaattttctgtataatttataattacgaaaatgaattcaaaacaaaaaaagcttcaatcaactgtttcaaattcaaaaaaataaagtaatcaatcaaaattaaatgtttattgtaacggagaagaaaagctaaaaaaaacagttctctcgtttttatgattcatcacaaattaaatttcctttttggggattcatcaatgtatctttttactcctttgttctttgttcaaatcttggtaaaatttcactacagaataatataaaaatggggttaattcctcagattaaacttttaaattactgttttctctttcttctttctacatcaaacaacaaacaacaaaaaactatcaaaaatgaactctaaagtcgctgctacccaaaccaatcaaactgatgataaccaagatgcaaatacctggggttatgaaatcactagacaaactaacatgtgtacttgctactattgcttaattaattaatgttataaactcattatactttttcaatcgtttatagttatatataactttctttaattaaaattaattgctagatttaactaccaaaataataaaaatgaatttgtcttaaaatcaatgtaatctcaaataaaaagtcaaaataaataatataactatatccggaaatgtaattaaacaatacaatcaaagatgtaattctccaatccatccgtaattatcaaacattaataaaaaacatgtggaatgattgcagattcatttttttgtaacaaaaagctaatttaaaaaatagataacaatgtagtaaaaatataaaaagtttcctttttgggacatatcaatgggtatacctacaagaacgattaatttattataatttgttttaattaacaaattagtcaaactaaaaatataaaagctaaatggttctttctttttttaactaatgattttgtttccatcctctttctacatcacacaacaaaccaaacaaacaaaaccaaattaacaaaaatgaattctaaagttgcagctactcaaaacaaaccaaccgatgacaaccaagatgctgatacttggggttacatgtgtactttgaacactaacatgtgtacttgtacaattgcttaattttacagctcttattttacaattcacagttttacaatgctttgaattaattgattcaattttttataattctccatccgtttatagttatttaaaacttatttaatttaacagattactattcatatagttaaaaaacttttgtataagtactttggttatttttctataatcacttggtattgtcataacggtatcatataagttatgccaaaactaaaatgttatccattctattcaaaattttcatgactttttgctttttttaattttcacaattaagctgcaaaaaaataccgtaattataatcaaggcttatttaatcattggttgctctgtcgtatcaggtataaacttagtcctaagtgttacgtaataagataaaacgctaacttatcccaaaaaggataattaattgaatactattaatagaagaaaatagtataaagattgtagaaacaatcagaaacaattgggtttggtttcaaaaaaatcattttatactttggattcaaaagtttgaagcaatatttagtttagctgtggtagaaatcaaaaattactgcttttggatcacacaatgattatccaagatttttacaggtaaaaactgaaacttttgcttttatattgatttacttcagtattaacaggattaaacttttataaattccggagtattctctaaataatttagaggctgtatttggtcttatctttctccatcacactacaaacaacaaaaaaaactatctaatatgaactctaaaattgcggctaccaaaaacaaccaaaccgacgataaccaagatgctaatagctggggtgacatgagttatataagagctggtgttttatattccccttgtaccattgcttaaatgtacatcttttaacgttacaagactccagactacttgactcacgtttttataattcttccttcgtttatagtaaataaaaacatgtttaatttaacaatttacaaaaacttaacaaaagtttataaaataaaactacttttgtacagtattaagtaatattatattgtacttgaataagttatgctatccatttcagatccgcttgaatacgtacaccattacatgtattttttgaactatgtaattaatttcatgttttttaatattattgatgccatttaaaatgattttagacatatcacctaaattcattacgtaatattttttttgaaaataccactttatccgtaaaagaataactaactaaataacattaatatttactgactaaaggggaatagtaaaagcattgaaagataaggttttgtttcaatgaaatgtgatgtgtttgataattcaaaagtatatgatgagagagaattgaaaaagtgctgatgaattaaaaaattacccttttaggatagttcaatgaatatctatgaattttacagaattatactggaacttttaatatcatttcaattaaattcaattacttattataaatactggggtatttttcaaaaaattcagaagttttgattgatgttttttttctacatcatacaacaaaccaaacaaacaaaactaaattaacaaaaatgaattcgaaagttgcagctacccaaaacaaaccaaccgatgacaaccaagatgctgatacctggggttacatgtgtactttaaacactaacatgtgtacttgtaccattgcttaattttacaaatcttattttacaatgctttgaattaattgattcgattttttataattctccattcgtttatagttttttagaacttatttaattaaacaatttattttcttattaaaaaaatattacgtttttataaaactgtaaagttattattggtttcaaaacaatactaaacttatactttcctaagatctattttgtaatatatgtaacagtaagaattatgttggaactgtaaaaaatgaatcttaatgtgaacaaaatagcaaaaatccaagtcactatgattatttcattattggggggtgatattaatgatagatagattcacaaacagagtattaaagacacatgtgcgtgggtagatcattgccaatccattaaacatatgatacaatatttcaagtagatgaaacaacagatatcaatttaaaatcaaaaagatgatgtttcaatgagattcagatctaggttgatgaaataaaattcataaaatttcctttttgggtcacttcaattgaacaaaatagtttaacatgatttggagtaggtttaactcctagatactataaatactgaagatttcttctggtttgaactgattattttgcttccatacttttgttcacttcagaacaaaccaaaaaacaaaaccaaattaacaaaaatgaattctaaagttgcagctactcaaaacaaaccaaccgatgacaaccaagatgctgatacttggggttacatgtgtactttaaacactaacatgtgtacatgtaccattgcttaaatgcaagtgttattttacaaaactatataccattatttccaacttcctaaatagctatttataattatcttattttaaaacaaatttaaattaaaattgtttctaataattcgattgtaatcatttactgtaaaacaaaagctcaatcaaaaggtatcttgtatttattttgttgagcagcttttgcagcaattgcacttggaactttaataccacaacaatcaccccatgttgataataacggattgtctatatttgatgatccacaacaaccaccatgtgcgtggtcatgaccatcatgttcatcttgatcaccattgtgatctggtaattcagagcatggtaatgtggtagtgaatataaaatgctgcactactggtaattttcctaaaacttcagctttgtacattttaatcaatccctcttcaattttcttccaagtttttacaccacttatatcatcaagcattggtgatgtccatctcaaactttctgcacctgttttaactttattaataaaatccacacaagcaaaataaaaatatttatctttgaattcttcaacataatctaaattatgtatactcaatggtctaggtctattcattggtgataattgagcagctccaaataaaaatggtaagaaatgataatcatcaagaccccaaacaccatgagatcctgcaggttcaagccaataaagtgtttgtaaatgacgcattactttcaaatatcttgcaaatactattaaaacaattgatttatctaattcgtgactttctgggaagtatccaatcttatcaagagctaaaaggaaacataataagtttaattcatgacctgagccataatcaattctttgttgatctccaaatgagtttcctaaatattcacttaaatcaaatatctgttgctctgtaaaatcttttgataatgaagatatcattgaatgtaatgaatcgtgcagttgtttatagaaatcacgaaattcaagtttaccaaatctactacttgtttcttctttaactggattctgttcaattatttgatcgattttatcaaaaatagtaagaatattttctatttgtgatggtcttggtaatgatttatctgtaagttcaattccatggacggatgttgctaaccttaccacaaacgataggagatcattgtatgtttctgaagattgaaatatttctaaatcttctttggatctaatcttggactttactgttattatttcttgtgaagcttcctccgtcattgttctagagtgtagaatgtgtaatgttctaaggaagagttttaaaattgaatccgaataatccgtttgttcatgacatcctggttggtagattttaggcccaagatttttttaagtattacgtaatagcattttaattataatttaatgtcatcgatcaatggatcttgactgataataatagtatatgctgtataatataagttcagtaatggtaaataacaagtagaagtgatttttcaaaatatgaatagattagaaaattaaataatgattaaatatgaagtaaatacaaaacggtaatatattcattagactgaagcaacacctttttctcctatctcagcaggtaccttttcagcttcactttcactggaaatattatcttcaccatttaaattagattttggaccatggtagtatttatacttgtaaataaaaaagtaaatcattgataaaatccaaacaccacaagtaataacaactgtataattcatatcagttttattaacttttttattggctggaatcatggaaataacaataacgaaaataccccaagaacatgtaataatactgttcaaagttgaccagaaataacccataaagaaaggacctggagtaaatctacttctaccagtggttaatcttaataaaacaggtgtacaccaagcggtatagttaccagaaactgctaatgagaataaagcggatgaagcagcagaaccagctaaacataaacatcctaaagctaatgaaatagcagttgcaaaaataacagctctaattggaacttttaattttggatgaacaactttaacatatgatgagaatggtaaaccatcatctctagcaaatgcccaaatttgtcttgataatgcagttaagatagaagcacccattaaccattgacaagcagcaatcaatgccataaatgcaatagcccatcttctacctaatgaatcataaaagatttgtgccaatgggaatccagttgctgaaccaataactgattcgatatcagggttaacacatgcattaataacaataataataaagaaacctaaaattgaaacaacagagacagatgagataataccaattggaactccatgagatgcattctttgcttcttctgacatatgaacacatgaatcaaatgcaccaattgtccaaacagctgtgaataatgaaagaacaaattggaaaccaattggccaatctgagaaattattaacttgaccaaaaataaatttaccatcattaaatccatgatgattaacagaattaccaattggaagagcaataaagaataagataataataccagtattacagatagcagaagttgattgtaataaagcaatattctttgatgaaaggcaagtacaaaaagcttgagatacaacacaagccgcaaacacaccataagttttaccagttgtaatttcaaaagtaccattatgagataaataaactgcagctaaaatttcttctgcattaccataacaaattgagactaaaccggcacataatgccattgcattacagaaaccaataaaatatgagaagataactctatatttttcaggagcatagtaataagtccaataatataaaccaccggaggttggaatagcaggacgccagttctgacattgataaagagactgaaataatcataattgaagcagcaaaccaagaccaaaggaacccacctggacctgcacttaaacctaaactagataatgaagcaattgatggaagaacacccataattgaataagcaataccaaaaacttggaaagttgaaaaagttcttttcaattcttgtttataaccaatattagccaaaagatcttcatctccgacagtgtgagttgcatcaatattacgcaactccgcttcattggacacaatttcttctaatcttgtagtaactggacttgcaaaattatgatgttgatgacctgaacttaccgtatgcatttttcgttaaagactggtttgcaaagaaaatacccaaaagaatgaaatagaacgatctaaagaaggatgctatgataaatccatcttaaagatggattaaaggttcttttaatagtctccacatttaattaaaaaaaaatcttcgggatcataactaaaattaaagataataaagataataaagataagaaagataagtaaaaatagggacggataaccaataatgactcaagtaaaaaaaatatacaagatttgctagcataaatttcgcaaatttttattgacatcctctattgtttctacagtaattttacctcttggtgtttatatagatgtatcatttctcctttcttataggccagttacttcactttgtaccaacaaaaccagttacactagaagaagtattactcggcttaagggagattctgaccgttacaggatatgccatcacctttttgactaattattaattaggaatctccgatacataagaaaattattataataataataatagcaactgacccgctaaagatgaaactcatcagtatcccgctatgctcgcggtgaaaattttaaaaattttcatggaaatcgccaggttaacttaattgacagcaaattgtgtcacttttgacaccaatattgcaacggtgaaagctagggagggaatttaactaatgttaggttcaagcgtaatggcttgtggcttgtggtgtgaaaaaatgaaaagatagagatgcataactacgttatctattgcaatgtggctaaagttatcactatctagaagggctatacgggtgcaagataaagaatgccgctagggaaattatttactacagccggctggtaattccgcaagtggcattacagaatttccgagttggttacataagcattgcgtgaaattactctatcaaaaaaaaatttttattacaattccactggaaacgatcatctacattgattactataatgatttgaatgtgagtaatagttgattatttataaattgtatacgtaattatagagtatattaaatagtaaatcattcagctggttcatttaataatgaagtgaatgaataaggagtgtaaggaacaccttcaccttcaaagaatttagacatagattcaacccaatgtaatcttaaagcatgtaacatagcagaagtaccttccataacgactaaaatacaaactgtaagaacgaaccacataccaaacataatgaaaacaaataatgaacctccaaatcctttaaagtaaaaacttgaaccaattgtcattgaccataaaacttgtgataattgtgcatgagctaatgataatgcccataatcttaaatacgatgcagtatgagaaacacaattaagacagaattcaattgtatgaataacttgatgaatcataatatcaccaaatgtttcttcttcatgttcttcatcatcgacaatatcaaggttagataataaattattatcatcattttcaacatcatcagttggtaatgcaattgatttttgttttaattgatgtctaaaccataatggtttaattaaaagtaaacatggaacacaaattaatgcagcaattaataaaaatacttgaacagttgcttgacctggatataattgttcatcaactgatccaggtgctaaaaacatattaattaacatatttaataaacttggagctggtttatcaattgcaacccaatcaacacaccatttgtaaacaatacaaactgctaaataaccgaaaataccatgcatgaaaataaaacctggtataaaattaccaacaatattaatcattgatttaaaatgaattgcattaacaagtgagaacatataagaatatgacatatgaataaaacccattaaaattgataatttcatcttataagaatttgcaaataataaagtattttctgcaccatgccatgcaggatctaaaccaatgatatatgtaccaactttataagcttcaatattatcaccttctttaaaatcagatggccattcccaacctgatttaaataatgacattgaaattgagaaaacatcattatagaggaaacctgtatacattgagaataaacccattaataataagatataacgaccagaatatgccatatcgaaaatttcatctctcttcattctaccaattgatttttcatttaagactaaacataaagcagctaagaacataataaaaccatgacctaaatcaccaaacataattgcaaataagaatgggaaagttgcagcagttggtaatgcagcattaacttcacgatatgttgcaataccataagaatcacacatcgattggaatgcatcagtgaatttattagttttatgatatgttggaggagttttagttgtattaacaacattcataataattggaacattagatgaaacatttgaagataattgatttgaacaatcttctaaagttgtttgaatatttaataattcatcagttggtacccaaccttcaccaattaaacattttctatttaaatcgtaatgacatttattcattgtaacaaaaacagatttttctaatttaacacatttaatccaatcatcaatctcacttgaaataactcttaattctgtttgtaaagttaaattagttgtttctaagacattagtaatatcagttaatttatcattaatttgaacttgttgatttcttcttaattttgaatcagattcaacaaagtaaatatctgcatctaatgattcacaaattttacgaattctttctaaaatcatttcaccatgtgaaaaaataacaaaagtatttttattaacatattctttggcctttttatcatacatttgcttttcaatttcaaaggttttaaataataaattacctcttaaaactctccataaaattttctctaaaattgcaatcttatctcttggaataacacctgttatgaaatttgatgatgatgatgatgaagatggagtttcaattggatcagaagaattattattttcgttttcattcaactcattcaaatcttttgaaacgtcagatgagaaatatctatcacttgttgataaaacttgttgatattgttttaaataaatttgctttttcaataaagtttcagatgcatcagctaattgagttactctttcttctaaaatttgagcatttgcaataatttcatctaattgggatgttgttaatgcatttttatgagatgcttcataatcttctgctaaagtttcaggtggtgtaataccattttcttccattaacttaatcaaaaatctatattgtctttcaacattatccaattgacggatttcatcaacaaaagttctttgaaattgattgacatttttatttaaatcacgaaattctactaaacctaatgaacctaaggaataaattgattctcttgctatttcattaggaatatacaattgaatcattgacatttccgcagagcggaaaatggcttcactttcagacatgattgcacctgtttgtaaaaagagattgataataaaagaggagagaaaacctaaaagaaacaaataaaaaagaataaactgctaatcttttataaactccattccaatcacagaacaattgaaattctgatgttactgtactgcaaaatgaaataaaaaaaaagaagcagccaaaaaatttcaaattctgcgtcggtgcgccggttggttttgtctctttattgacgtttgtttccctgtggggtgcattcactgataggtcaacaaccactgctcttcttaaaggatataaactcatggctttgcagaagatagaagtagaaccggtataccctccaccggcttacactcttgtagacacttatcacactcaaaaccctccatctgtacacatagattactcagataaaactcatcttcatgaacaaagccacttcgtacaacgtaaaataccttgggaatatacaaatactcgttatcatgatacattattcatatttgtattaggtggaatactttgtgtatttgtaacagtatccaatgattgtctttcatatctctatgaattaaataaaggtaaccttaatttattatcatttaaatatgcaattgataatgatattaggaacaattattacagtattggtttattctttggaattagtttatcaatttgtttaatactgggtattttacaattaattggtttggtatttttctatcgaatattcataacatgtatttttgttttgtctacattcacattcacttcattagctgtttatttttattatcaatttcagtatgttctttgtggtgcaacacttgcaataatgatgggattttaccttttaattacaattttatacaataaagttgcttttagtgttgaaattgttaaaattggttcaagaataataaaatcaaatataacaatttggttgatttatttagctatgtttgtaatcaattctattggaatgttagtatattcaattatagtatatgcggcttatcttaaatggaaagaagaatctgatttaaatataagatatggaatgtggatgattgttgtattttgtggatattattttaatgaggttttcactaattcatttcatgtgattattggatcaatttgtgccaaatggtattatgaatcaaatgttaaagatattaccgttattcataatactttttcaaaatgttttggatcaatttgttttggatcattatttgctagtattgttagtctgttgaaagatataatacttttcagtaaaccaaatgataagattatgaaatatccttttgttaaacttctatggaggctttttgaaatgcttgtcttgttgattaattacacagtacaatattttaatgagtatgcatttgcgtatatgtcaattcactctaaaaactacatgaaatcatcttataaaaattacaaaatgtacaataccaaagggttaagtacattagttagtgaatccataatcaaaccggttttaaaaatatacacagtatttgtgagtattcttacatctacagttgtatattgcataatacagcaattaaaacaaccaccacattccttaataattggtgattctttacaatggtacattatagtagcaagtggaatttttgctatgcaaatttgtagaatgattacaacaatgataaatgcattcgttcatgtattttttgtttgtttaatagaaaaccaagatatcttacaatggacacatcctagagagtatcttgccattgccaagtacctaccatcttcacgtcatagacacaacaccattaaataagaagtatgcacactgtataatataattagacactgtatataatagaaggttataaacaattaatttccgcgcaaatttccatttactcggaaggtgttttaatgacagtcaaattgaattgaagaggcgtaacgtgttaaacttgggatgagacttctttttcttggaatttgatacacaatgacaagtatgagcaatcctgatataaagaacattagggaagttgaaccggaaccaattggttcaggattgaatagaaatcatggtaattatactgataatgaacaaactgaggacactggaaacaataacgataatgaatatactgaacaaagtggagatgagcatgtatcggaagaaacggaaatgggagcacaagcttatgatccaggtgacttcaatgatgatgattttaacattgatggtatagatgatggtggtgatgaaattgaaggattttcatttcaagaggatagatttactgcatcaaaacctgtttggaatgatgttaaatttgcagttttcttcctagtaatattatttatacttattgttacttcaatgacattaatggttaaatattttggcaaatatatcgttgataattcaggtaatgcaactttaccaaatagtgtttttttccaattcaagacaattttcttatttttattcacaagtttgatttcatttggtagttcaatgtttatatttttaaatgctggtaaaagctcagaaagatttgttaattttggtattaaatttttaattggacttttcctcatggctgcagcggcatctttattagttggacaaattttacaggttattttctttggtgtaatatctggtgttttaattttaattgttaaaaaatatcaaccattaattacattagcatcacatattttaagtattgttattgatgtgttgaaaaagtatccaagtacagcaattgcggcattgattggatttttcacaagtttgattttcacattaattttaacaatttcaatcggttgtgcatatattgcatatggatttcacagtgatggacaaagaattgatgaaaattccaaagttacaggtggactaatttttactattttattcctaaattttgcagggttatatattattgatgtaatgaaaaatgctatgcatgttacaattggtggtatttatggtacatggtattatctaaatagtacattcacaggtatgccaaataatgaaggtttaggatcatttaagagagcaatgacatatagttttggttctgtatgttttggttcattatttgttgttttcttccagatttgggctatatttgcaatgattggtgataaacaagttggtattgttggtaaattttttgacgtagtattaaaaattgttggactaattgttggatattttaatttatatgcatattcatatgtttcattatatggagttgatatggtcagatctgcaagtagtacattaaaatttttcaaacaaaggggattacaggcaatacttaatgactcaattattagtgcagcattgggattttattgtttaattgcaagtttattaagtttattaattacatgtgtttacttggcaattatcagagcaatctttggattagatgatgcagtttaccttccattagcgggatattcatttttagttacattcaatattacaagtattttaataattacaattgtcagtggatcatcagttttcttctttgcattaaacaaagatccagctgttttccaagagagttatccatttgaattccaagaaatcagtagatgttatcctaaagtacttgataagttggtactttaatatatcgatagtaacgcatgtatagaatctatataaaaaaaatataagaaaccattaaatagtaagatatcggcacggcgggatcacccaaatagccgaggtgcttgagaactctttcaaaaaaagaaacgaggggtgagaaaaaaagggctcaacttcggtacggctgtgcgatatacacgccgtgagccgatttatttgaattactatatacaccgtgggaaatttttttaaaaaaaataagattctctattttttagttttacgtaagcaaaaattgccttttttcatgaacaaatgcgctatgtaattttagtaaagaaactcactttaattttttgaaaagtaaacaaaaaaaaagtgattttcaaatttcgagaatgagttttttcatgcgccgcatttacaaaatttttaatgcgccataaattccaaaaaaattgcggatttaaaaacgacgcgaaagataaaaaaattcggagataaaaaaaataaaaaaataaataattcggagataaagaaaaaaataaaaaaataaaaaattcggaaataaagaaaaaaataaagaataagaaaatcggaaataaagaaaaaaataaaaaataagaaattaaataattaaaaataaagaattacaatagaagataaagaattacaatagaagataaagaattacataaagaattacaatagaagataagaaattgaaatgaaagataaagaaaaatacaataaaagataagaaattgaaatgaaagataaagaaaaatacaataaaagataagaaattgaaatgaaagataaagaaaaatacaataaaagataagaaattgaaatgaaagataagagattacagtatttgtaaataatttaacaatctaaaacaaagggaaaagaaagggatagagtcaaaatttctgcttttgtaaaaaaattaggggaattgaacagatatttataacaaatcggttttttaacatccaaaaaaatttaagcgccggaagcttgtcaattttgaatccgattggctgaaaataatatttgtttgcgtcaaaacacaaaagggtttgaggttttttcaaagatcacgtgattatgagggtttaccctttcttaaaaaggaaaatttcctaaaagagtttagtaattacaatttggcctatttgactgtatgattatttcagttttaataaccttttttcgatttaaattaatctattattttttcaatttatctttactaatttacagtattctttatatcgaattttattaacagtaattacttataacttttttttttcttactatagtaacaatattatacaattttttaattgaattacaaccgcttatcataaaaagaaagtattttatctaactttaaaattgtgtttgaggtgtttaaccatagtttgattttaaagcatcataacgaattaatttctgaagctaagttacgcaaaaatattgaagtgtttctgctattattatcatgtatctgtagtccttccaaactcgaatcagcccaattaaaaagggttgaaatttgattcgtttcagttgtattttctaaattgccatcatcttgtgtaacatcttcggaatctaaatacatactagggtcaacgttgtgtatatcttcaatatcaattgttgtgaattctttgtattcatctaaaatcgtttgaattactaatttgacaagtatttttggtaagcaatagcatctacctgatctcagtaactctctgtaaacttttctttttctcttaatagtagggaaaaattcatatttgagcaataatgatactgtcatacatagcatataataaaatttagaattacttatacgtttgaatacactattcagcaactttcctgtgaaaatcttgttgttagaaaagataaagtggtatgaagaatgagatggtatccataatcttaattcgatgttagtattggtggtttctaattcaacaaacaatagatgtacttacggttgctccatttctgtctttgaaaagaaaaggttagaaatagtaaagagttatagaataaattattaaaaacaacaacatgcttgaattgtaaaaataaatgttacgtaagaattaaaaacttgacagattatttaacgttgacacacactgttggacaactttattaacttgcatgttcaatagtaaggcctgcaaagtatataatttaacgactatttaaattacaaagatcattaattacacaacatattcaacacattacattattactcggcagcaaatctgaaaacgtttctgaaatctggatgtttatcagcaataatattgtcatactcttcaaaaacatgaataccaaacagttcaacactattgttcagctccatccattcaaaatcaagatcggaatctctcattctagaatataatgcaaattctaaattcccagaataagttttcatccaatcatgttcaatattcacttttttgaacttcataagtaacttataacgatcatgaagttcaactttaacaagcctttcaacttttacatattgccaattgttatccaccctgaattttgcataaccagttacacctttattactaatatgagtattacgggaatggatatgtttttgttctctgattatcaaactttctccttctgttatttcaccttgagcatacaatcttgaaagagcaccttccatgtcagcatcgggttgagcttttgctgtttttgatgtcgaataacaactcatatggtcatacttatattcagttatgtttttgcaaatgtcaatggttaaaaaagtcaactgattttgtgtagttttataactatttttatgagggctcacccttctcctaattgtgcaacaacatctttctgtatgaaaacaccaattatccctaaaagacccaaactctttccacaagtcgaataaatgaaggatttgatgagaaggtacatgaaaatatttttcgaagatcggtttatattcaggaatttgaaataatctttctaatttcaaagtcaatttcaaaaaacttcttctcatctcattcctattattattatcaacaaattcaattggaacatcagtggcaatcaaagcaacagcatatgcattcatttcaatcatacatttaaccaaaaattgataaggagttaacggattcacatttttaatgtcttcagcaatcggtaagaaatataacggaaaaatatgtgtaaaagctttaacatcaatcgctttaactctactcttggtcataagtgaatctaaacaaaggggtatatccctaatctcttcaaatagatgaacttttaccaaatattcatctaggttttttttatgttgaagaattaaattatgtgatgctatatccagacgtttaaaaaccattgaaacaaaaatgctcaccactcttttagtaatgtaattctcataaatagtatgcatcaaatctggacaaacaattttgaaataatcatcaagattaagttgtgaaactaaagattttgcctttactctccaatctgttgtaacatttccagccaaagtttcttccaaacatgatttatacatttcagttgtaacttttatatctttaaagacattttcagcatcatccacatctatttcttcaatttcgtcaaaaaaagtgtatgtaacatcgttattttcattgttagtattaccatcattaccattattactaccttcttcttcaagtctgttacgacgcatttctttagtcaaaggtgtaagaaaaatttgtttttctgatttatgaattgtgcaaaaagaacatggatgatttgatctaggaggtaatgtttccaatacattattcaatgccttcatatcagcagacatcgataataaatttatttttatagtaatttcctgaccattttcaataaaactaaaacctttttctgaaagaagatttaattcttcggagagagccttgcaagtaataccagtatatccaggtgaatcactttttgttaataaaacttctggcatatgaataaaattatttttatatcttaacatttctggcaaatccataaacatgacacaaaaaactttgattcctttataagtcttcacttgaatattacaatcatcactcgaaacatggatgttaaaagtaaactcatttggattgttactgcttacttcaaaaaacctacgcattttatcagattgataaacagtaccaattgcattagtattcctagaatatttctctctctcatcttccatatgttttctgatatctttattttggtaaagcgaataaagaacaggaacgattgactgatatctaaatgattctgcatcacatcttttatgaacttcgttcccaagagtatgctcttgaaggtctttattttcaaaaaaatagagacacagtgaacagtgacaaaattcaatatccttacatgtacctactttgctccattctttcaaaactctttcattgagacgtcttatttctaaatctttagggtgaattaaaccaaaagaatgcatgaatctcaaaataatgttagctttattcatagaaatgtagtgatgagaagacatccaataaacaagaaaagcacaatcagtatgaaagattctcttgaaattatttgccatgaacgcatcaaattgttctgcattgaaatgtggtttttgatattcccaagaattctcatctactggctcctgttctataatatttggatcattttctgttggaacatcttgattaggtcccccctcatcgtcactactgtttccaaaataatcagattcattagaaccacccatattatcaggcattaaatctgaagcatcactaaaaaaaccattattattatcatcatcatcatcattatcaccttcgttaccactatcttcagaagaacttgaatttccggagttaaacccatttgaaggtaacacattattaacctgagtatcaatttgattatcaatataagcatcaaaaattggtaattcatctacggacattaaaacaggagcatcagaatgaatattactagcattagcatcgttggtaatagagaattcacctacaggaggagattcataagcatcagaaagaacattatcatcatcaatattattggaaattgaaagattatctaccgacatttcagatgaagtattttcagaggtagcaccctcaaaatcatcattagttaaaacgtaatcagattcgtatctgtcacaattgtttatttcaataaatggtgaatctattataccattgtaatcccagcctttttcattaaaaaaacggttaaaaatgtcattcaatgtatctgcaatatcttgatctctcttcgtatttaacttcatgaaattaaatgatgattctttaattttttccaaatcatcaaatttaagtcttcttcttgcagcagctttaagtgtggttaaaaacccaagattcaaaccgtatagatttaagagtcccagtaaagaacctctattggttagttttgcatttttgaattttttaaaaatgtactttgcttttcttttattaacttttctagacccatatttattctcaagagtctcaatatcatcattgatattattttgaataaaattatcaatatcggcattaaattgaacatcactagacttctcttgccctgatctctcgttatagtaataattaaaattcaaagttgtacctgctgcaaaacgctttaaccttttttcactcaaaggttcccttttgtgttcctgataagatttgataattttgtaaagaatattttgcacgtttttaatagtgaaagaagatacagatgttatgtctgtttccagtattgatggtactttttccctcaaaaaagagagaaatagaagtgtatcgtctgtgtaactcattagagttgctatgactcaactataatattttagtagttcaagaaaaacgtgaaataaacaagccagataactttgcattctttacaaatttataattaatacgccaaaatgcagtattacttttaattaacacgcgtaaaacatgtttttgcttacataatctttacaatctccaaaaaacttgacttaacgccgcaaaatttggtgttcattacgtaataacattgacaactcactcacagcactctggatattacgtaataaagcatcaagattacgtaataaaattcaaaatttggagttagatgattggttagaatctcctagtttcagggagcccaaatataccggtgagacccttcaaaacttacacattgtcgaaatacaaagggaaacatacgatttttagccccaaaatcgaacaaatttgaattataatggttacagccgcaccaaaatgcgggttttgaaaattttactatgtaaaaaagttacaaaatttcccacggtgtatattatagtcattaaaaggtgaaagaccctttgtttgacatattttgccattcagattatatatagttgaatgagatgtataaaaggaagtataaggtacacttttttcaaatttatggattatagtttattttatttgaattatctttagtatttaatttatttatttttttatcactttcggtaatgagtactgttaatagaaatatcaatgaaataaattcactgcactcggttgatactgagattggatcttttaattctaataatgcaatggaatacaataataatagagaacaacaacaagaagaagaaattgaagaaactccattacaacaaactaaatcacaaattaatgatttaatcaaatctttcactcatgaacaagattcaaatgaaaaggaagagaatgaaaaattacaaaaattattaacgcaaaattcccaaggtattactaaactgaaaactaatttagaacttgatggttatggattaatgggtccacttgaacaaccaattgatatggagaaaacaacaactgattttcaaatggatccaaaaacagatttccatgaaaatgatccttggaaatatcctattgatttagatacacaaatgagattagtcgtttttactgataatgataaacaagatccaagaaattggtcaaatatgaaaaaatggtccttaaccatgttattaggtatggtctgttttgatgttgctctaggttcagcaattgttactggtgatattgaaggtccaatgaaaacttttggtgtttctcaagaagttgtcattttaactgttactttatttgttttaggttttggttttggtcctcttttatttgctcctttatctgaggaatttggtcgaagaattgtttacattacaacattatttgttgcagttatttttatcattccttgtggtgctgccaaaaatattggtactttattagtttgtagattaattgatggtttagcattctctgctccaatgtgtttaattggtggtaatttggctgatatgtttcaaggtgccgatagaggtgttgcaatgagtatttttagtgctgcaccttttcttggtcctgttgttggtcctttaattggtggttatattggtgataatgtaggttggagatggttatattgggttcagctgattttctctggtgtcgtctacgcatttgttgttgttttcttacctgaaacttcacattcccagattttaaaagttagagctaaaaagctaaggaaattaacaaatgatgatgcttatagatcattaactgaattaaagacaagaactttaagtgaaacggcaaaagaaactttagcaagaccaatgattttattatctgaattaattgttttcttaattacaatttatatgtcggttatttacggtttattatacatgttcttttttgcattccctgttatttttatggaaggtaaaggttggtcagcttcaaaaactggtttgatgtttattccaattgctgcaggtgttttacttgcaactgctattactccattatttaataaacaatataatagattatctgctaaatatattgaaaagggtgaattaccaccggctgaattgagattaattccaatgatgattggatgttggtttattccaattggtttattctcatttggatggtcatcatatccaacaattagttgggcaggtccatgtttctcaggttttgcgtgtggtttcggtttcaattgtttatacaatcctgcaaataattatattgttgattcttatcaacattatgctgcttctgctttagctgccaaaacttttgttagatcaatttggggtgcttgtgttccattatttacaattcaaatgtatcatagattaggttatgaatgggcatcatcattaatggcatttatttctcttgcttgttgtgcaattccattccttttctataaatttggtgcaaagattagagaaagatcaaaatatgcttattctcctacaagtacaaagaaccctgttacagaagaacctgaaacgggtaatgcttcattccatagtgataacactgaaaaggcaaagagtgaaacttcttaatttttgatgacaagctaatgattttaaattcataaaatactttttttcccaatattctaatttctaataataactaattcaatttaatttaattttgtttaatctaattcaatataatcttttttaatataatctacttcaaattaatctacttgaattcgatctactttaattcaatcttatataacttacaatatataattttataattttttttttttaattttacattaaaaaaaccctgaatctcataaaaaggtctaaaaaattaattaactgctacaaatcgttgtaattacagacaatcttaattaaaggtaatttaaacttaaaaatatgttgagctacccattgtgagtcaaaatgagtcgcacgatgattcaatttttgactcaaatgattccattgactcgcgcagtttcgttgggaaactgaaaaaaatgtccatctgggaaattatttttcatctataaatttcacttctttttcctttattcaatccaaattcaactaacttcaactctatatttttttgctttatctacttttcttttcttaattcaaacaattcaaaaggtattacaaaacaattatggatactgaaatgcataaaagtttatcagttgatgatcattctgaaactttagaactatcaagtaatgaaattgtctccaactccgaaatgacatttgatcctgaattactcaatacttatccagaagattatgttccaacagaacaggaaatggatcctatttatagacgtttagattaccgtatcattccagcctgttgggccttatacttctttgcatcttatggttcatctctatatggtaatacattgactatgaattatgaagaaggtcattcacttattcattcattaaatctttcagctcgtgatacatcaaccgcttcagcattatattatgttgcattcattatctttgacttaccaatgaatttgattatgactagagcctctcctcaagtttggttatctagaattattactggtgttggaattgtttatatctgttatgctgcattaaataatggtaaaggattaattgcaattagatttatgactggatttgctgatgcgggtacatggccaggactatcatattatatttcattatggtatccggaacatagaacagcacgtagaattggttattatttcactgctgcacaattatctgcatctgcttctggtttagttgctgctggtttccagaaaattgatatgaggaatggtttatacggttggaaatggtattatattgtttatggtgcttttactattgcatgtgggttatcactaatttggtggttgcctgatagacctcgttaccttaaatccactgaaactaatatgttaagttttagggaacatattccttccaaaattatgaaatatttcactccaactcaaccattaactagtagagaaaaaagactgcactatttagatatgaaatatagatacaaaaatattagatggggattaaaggatgttgcgaatgttttaattgattttagaacttggccattaatcatgatgtattttggtgttgttggtacaggttatggtttagcagtttttgcaacaactttaattcaagtaaatcatccaagtttatcaggtattgatgtttctcttttatatgcaccaatttggttatttgatttagcttcaattttattaattactcctattgcagataaatttaagaaattaagacatgcaattttcatcttttcaactttaatcattatcactggcttattggtcacatcgtatgcacatggtccttggaataaatatgctggtttattaattgctggttttggtttaggtccaacagttcctattactatgacattagcagcacaaattatgacacatagatatggtgatgttggatgtgcatcctctgctgcaattgtttcaggtttaggtaatttaggttccgttacggcaacttatgcattgtactccggttggaaagctgatagggcacgtttatatagagattctaacatgatgttaattttaatgcttggtgttagtattgttgcagcaatagtctgttggtttattatggaaaaagttgataatggtatttatgatcttaatggtaaagaaaaggatgttaataaagagaaagttgatgaagtcgaatcaatgcctatcgataataaaaactagataacagaaatagattagatatatctttgtgtaaataaaagtaccaataaaaatctaacgactttcttatcgcattgttcatgaaagtatattcccgtgaaaaaaaaaaactcaccgtgaaaaatgacggtattacatcgccgcattttcttaattgggaaatgcggtgtttaatcgccgcattgttgccagataacaacttcattggtgttggattatgttggaggtattatggaagaatgattaatataaaagccaggcatttctcctccattttgattcaattctgttaaaatatttttttttctttcttattattatcaaacaaacacacaaaacaaacttatataaacaaaatggctttacttgacaaattcgaaaaatacgatttactttttggtccatctccaatctccaaatttgaaaacttagctaaaacccttggtggtaaggttaatatttatgcaaagagagaagatagaaactctggtttagcatttgcaggtaacaaattaagaaaatttgaatatattgttccagatattttagcaggtgattacacccatattgtctctattggtggtattcaatcaaatcaaactttaatgaccgttgcaactgcatgcaaattaggtttaaaggctgttactgttcaagaaaactgggttccaattccagaagctgaaaaggcaacttatgataaagttggtaatattgaagctgctagaattatgggtggtgatgttcgtttagttcctgatggatttgatattggtatgagaaaatcttttgatgatgcaatttctgaattaaaggaacaaggttacaaaccatatcctgttccagctggttgttctgaacataaatatggtggtttaggttttgtcggttttgctgatgaagttattcaacaagaaaaagaattaggtattaaatttgataaaattgttgtctgttgtgttactggttcaactgcagcaggtatctttgttggtatggcacaatatggtagagaaaaggatgttattgcaattgatgcttctggtaagcctgaaaaaacttttgaacaaaccttaagaattattaatcacacttctgaattaattggtttaaacaagaaatttgattctttcaatttagatagtagatttggtggaccagtttatggtattccaaatgaaggtactattgaagcaattaaattacttggttcaactgaaggtaccttaactgatccagtctatgaaggtaaatctatgcaaggtttaattcaattagttagagaagacgcttttgaagaaggttcaaacattttatatgttcatttaggtggtgcttcttctttatctgcataccaatcttacttcagctgaattttatagaactaactttataaaaaatttataacttgtgtaatttgcattttaacttttgatttttaaaaatatattataataacctaatgaatgtatatcagttatgaaaaacagttaagccaagtatacgcccatgtagtaacggtctagatataaacttaaaaaaattagagaacaaaaataaaaattgagaagtacgggattcgaacccatgacaccagcttggaaggctggtatgctaaccactacactaacttcccggtgcttattgttttgtttgtgagaaaatttctatgacccaaattttatatcacgtgactaacaataaaaaaaataaaaataaaaaataaaaataaaaaaataaaaataaaaataaaaataaaaataaaataaaaaataaaaaaataaaaaaaaaaatgattgaaaaaggggccctaaaagctactacaatcgacgattcaggtcctcccgaccctcaaaacgttactaaaccgcccaacttaccccatggtgagttcaacaagttaccttcagtctttgctgaagaaaaagaaaacgaaggtttgaaccaaactgaccatgaaactcaagacgaagatgaagatattgaatttcaagattgcgctgaggaagatgaagtagtccaagaggtaaatgcagaacctcaaccaaccatgacgttggctcaaaaactccataaaacaattacggaggcaaatattacggttgataaagatcatctttatcacctttcatactttctaaaagttggcaaagatcaatttttagaccttgaaaaattacaagaaattttatcctctttcttaaaagaattagaaagaaatattaatactacaaatttagcagaaatgcacaaagagtttcaatttatctttgaagattatcacaaaagcaaagataacaacaacaataatactattaaaaataaaaaaatcaacaaagttcataataatatgagcaaaccaattgatgcaccaactgagaatacaatggaagaaggcgcaaacatgtttaatactgataaatacagtttaaaaattaacctaccattggctgaaccaccgatggaattattacaattagtttctaccatgttagtagaaacatttaattcatatgatcttaacttaatggatcaatcttttgaagaaaacaacacacttgttgttttaaaaacggagttccctcctttcatcattaaatctaaatatgatgaaattattaaaaatctctattcagaatacggagaaattatgtcttgtcaattaccacaagaaaaagaatccaaaatggcattcaatatgaagttctacgaacaaaataaaattatttacacagtgttaaaactaaaatcatcagttttaccacctaaaattcattccatctcacacacaacaggtggaaaaacacataaaatccccatcatcacttacttgtctactgcacctacacattgtgtatactgcagatgtacagaccacactacagctagatgtccaatgaaaccaagttgtagaagatgttacaaccctagacataaggtcaaagaaggtgaaattccaaagaatggtcacagagaaattttctgtccaaaatcatcggaggctgaacaagaaaggttatttaattccctccacccaaaaacaagagagaatttcttcaaaaaaactctctcaagatcattaccaatgtgggcattgagaattagaaacgcaacggttaatgatcaagtattttacgctcctgttactccaagaacatcaactacaaatggtaatgggaaaagaagtagagcccaaacctctacaaacattttaaatctagatgcagctgttgttattaataatgacaaagtagattcagatggcttctctattccatctaaacctaagaacttatctaggtcagattcatcatcatcaatagtcagtaacgttgataatgcggtcaatcctttccaagtattggaaaatgtggatgatccagaaattccaaatgaagatgaaaacatccatagtgatgaagagatagaagatatggttgttgaaactaagcatgccgaaactacaagaagtatgccaaaaactccaactcaacctagaaatgtcagaacattagttaaatcttctaaacaaggtaagagtgtagcaactggtacattattagatgctaaaaaaatagaaatggcattagaaagaaaagagaaacttgaaaaaaagaaatctcaaatggatttagactcacaagtctaattcatttaattcttcaagtttaataaaatataaaaatataaaaattaaaaaaaaaaaaatataaaatatcataatgaataagttaaaaattttaaattttaatattcagaaggcaactagtccttctaaattaattcatattctaaattatgcaaaaaataaaaaaattcaaattatgtgtcttacagaatttgatctaaatcaatcaactgaattatcttcaattcaacaattattatccaatttcgatttcaaaattgcgattcaatctgttcaacatcgaacagcaattatttaccattcttcaatagaaatcatttcaaataatatttttccaaggcataatcgtgataatcaacttgcaaacttttatgtctgtgatataacaataaatttcaaacaagaaaacttaactatcatctctgtttatgtaccagtttacaataatgttaatgataacagattccactgcattaacaaaaaagattttattgacacattatgtccaactttatcatcattatctcgtggtgaaaataatctaatcatttgtggtgattggaatacacatcctatggaagcaacaaatttaaatcgtattgaatcatttcttcatcaacaattaatggaaaataatttatatgatattttcttccttccaaataatagaagaagtatatgttacaccaaccacggttcaaatggaacaaataatcggctagaccgtttccatgtttccttcaatctgctaagaaatatcaattttaaatatagagtacatcaaaagctcccgtttacaacacatagaccggtagtatgtacattatcagatatcaattcaaattctaataataatataattaataaagataatttttacaaaagaataccatcaattcctgattacattattgaaaataaacaattatataaatacattttcaccaatgagattctggatactaaaaacccatcaatggattataatgcatatatgcaaagagtttgctggaaaacaaataaagtaattcagataatgaaacatttaccttcatataaggaaaaaatatcatctaaagaattaggatttgattttaatgatcctcaattcaataatatctcagctaatctctcaaaaaacttcaagagacttagacttagatttggaaaacattcaaatgaagcaaatttggatgaaaatattataaatgatgcaaattcattttattcaaatcttttcgcatcaaatgaaatttattcaaatcaaaatttaaataacaaatttgacaagttcactgaaaatattaaagaacaattaactgagaaagagaaaaatgatttaattaaacctttttcaaaacaagagatatataaaaaccttctaaggctaaatgaaaatggtccatcatcaccagggactgatggtattacttacagagattggaaaaacaactgggtttctgctgctgtgattctaaccaacatggcaaattatattcttcaaggcaatttaaccacaactgataagattggtaaagtattgataaaattaattcccaaaaagagttaccgacaagatcttccattaatagatgatctacgtcctatcagtcttacaaattcatcacttagattaatcaacttttctatttctaatagaataatgcctattgcaaacaggattatttcccatcatcaacaagcatttatgcttcacagaaatattcatttacatattgaaactgcaaggattcttgctaatcaaatcaattcatcaccatcattatccaatgaacaacatatattattagtagacttgaaaaaagctttcgattctattgatcatcaatatcttaaaaagatcttagaaaaatttgggttccctaattcaactattgaagcaactattaaccaatctaggttagcatcggctaatatagttaatcaaaattggatccataaatttaatattccattaaggagaggtgtaagacaaggtttacctttctcacccctgatattcaatcttgcaatacaaccactgattattaaactccatcaatcaattagaggaatgaaatacaatccatacaatgagagaggtttaaatgctaagctttttatcaatattctagcttttgctgatgatatatgtctgtttcaccagaacaataatgaactattaaaatcactatcaattttaaatatttttgctcaaatttcggatcttaaaataaatgaaaagaaatcaataatttttattaataataaaggtatcaataatatcaaacaatttgctaatataaatcaattgaagctatcaattttagatatcaaagaaaatcctatctatctaggaatccccctgttgaaaatcaactggtacaataaaataaaccaattgaaaacaagactaaggaaaactatgtttttagatctaaatttatatcaaagagtagtagctgttaatacttacatttattccactatctattattttgaccaacatgatccaattccggatcctcttttaaattcttttgaaaattatgttaaaaaagaattagttaaatatttaccgctgaaaattgcagttagaagaatcaaatggcatcaacctcacaaaaatgggggtatgggtctgatcgaccttggtaaacaacttcaaggtagaagagcatatttcatttatataacgactattaaacagaagttaaaatttataaatgaacatcctttgacattaataatctcacactcattacaaggaattattaatgttatgatcagaaatcactacgtttatcattgttattacaaatatgttgaaaattacatactatcaaatagagctgtacctggaactttaccaaaaataaaaataccaggcactatttcaaatggattgatttcaacatatccgttcagtcttcttctgcataaaaatcataaaatatggggaagtaatattactattgaagaaactctttcaaatgaaatgtcaaaggttgcaaaacctaaaataataaatgtaaatacagggaaaataataatcgatcttgaaccaaatatcaatttcattatcgaacaccctgtgaattacaacatggatgaagcttcttcaaaaacattagcaccattaatggtgtactctaatattttcccatatttacaaggatggtattatttaactaatattcactcagattttcaggttaaagaaactacagatttcaatgcaacatcgttattttcaatggtagaaaaaaatgttcaaaaatggaaaattgtagaaattttcaataaaaatcaggaaatcaatgttgaatcatttaaacacttttctaaaagattttacaaagaagaatttaaaaataaatttaatgctgattattgggatggtaaactagaccatcaactggattgggaaacatgctttggttggttgggtagaatcaccaatcaaaaccatgttgattttaatgaattatttgaattacaaacaggaatgttgaattcccatttttatcacccttgccaattctgcgaaggggaaggtgggactcatcatgtctttttcaactgtaaaggaattgaaataattctaaaagaattagaaataaaaattgatctaaaaaatattgttggtttaatatcaacaaagaaagatgcttataaagcaaatataataatcaagttaattatattttttaacaaacaatgctacaaaagcaataagaatgatccagagtttaggataacaaaaagatatattaaagatacatatttgctattcaaatatgaaaaatttagttcttattagatctaaattagatgaaaaagattgagaataatcaaacagaaataatttacatttagttcagtatatgaagatatattgaattgatgaagcattaataatatatgcgtataagtaatcaatctgtataaaattgtatattttaatgaaattaatgtaaaagtaaaaaaatttcaaatttgggccataatatctttttttcttgcaaataaaagttttattctttgtagaacacaatcaaatggcttgaagcaaccccttttcaagttaaaatttgtttttgaaccaaaaaataactttcaaaaattgttgaaaaaatcaaaaattgtagacattgtaaattattttaaaatatcaatacttacatggactttcagagttctaattgatagagaataataaattttagttatctaggcgttataaatgtaaataaagaaaataaaagcaataaaatttaaatatgattacattttctaactaatttggcaacttcatgcttgtcatcctttgccaaaccttcagccacaccagcaatatcacatggtttcatcttttgttcaaacttatacttacattcagttcttgtaatttcaatttctaatccacaaatagccttttgtaaaagtttaatataactttcaggtgcttcatcaactgtccattcagtttctctattcttttcctcttgagcagttaaattatcgagctgagctctaacccattcagtttcatcatagattttagcagtaccataacaatgaacagctgcaaaatcccaagttggaacaactttatgagtatcttgctttgtcggataatatgatggtgtaatgtacgagtctgctgattggaagataactatcagttcatcaccagttttgaaagatggaatttgatgattgactttagcaatatgtgcatgtaaatattttttaccagtttcttcatcaacttttaaataaaatggaaaatgatttgcaattaaaccatctgagctgaaagttacaacagttgctaatggataagctttaataagttcagcctggttttcccagttctcttcaaggtgtttatcaggaatatacatagtacgtgttaaatgaataaagcaagtatcaattcacccagttaataaatttgaaacccaccaaaataaacatgctgactcattggatctttatgttattttactggatcgttatcaaaatcccatttttcaattcagcgcatcaaacttccctaaaaggtatatcgtcttcttatcattgatgataaggaatttgctctatactattgttacggaatttgatatattatcgttttaagactttgttacattcaggtttatttgatgattaataatgttctcttttatacaatgtcttagagagatttacaagtatttagcgcacgggataagatctaattttctgtagtttcagcttctctagtagcttcttcaacaactttttcagaagtactggtttctggttgtggcttttcagctgcatctttttcagccttttccttttcagccttctccttatcaatagcagccttatcgataccgtataatctgtataataattcagcagtttcatgtttgttaaccattaagttgaaactatgtttacctttccataatgggaagaataattcttcatcttcataacctgtcttaattctaacaaaacatgatccttcaccgacattatcaatttgttcaaagaatttaggatctgcattactttttctgatttctgcaacactaggtgatggctcaagtaataataatttaagtaattcaagattaatttcaatttgtctgatacttggtaaatattttcttataacatgtaaacattcactttggattctccatggacaaacttcactcttttgtgtaacaaataatttaatacctgtataaatgaatcttaacttaacgtcattattttgaagaatttgtttgatgattggtgcaacataataaatagaacgtaatggttcaccagttgcatttctaacaagtgcacaatcttttggaaaatctttagttacttgatagaaatcccaacatttttgtaaaacttcattatccttattaatgaaaataaatggttcttcatttgcatcaattggtaatttttcctttctttgtttaacaatagcattgacattggttgtttcttcagttttttgtttctttgcatcaaattcagaatctgcagtttcggttgattctctcttaagaatattaacttcttcctttgattcaacatctttagtaacaacttcttgttctggttcaccttctttttcaaaaactgtaataaagaaaccaccagtattttgatcttgaggataaactctcatacaatgttctaaatgtaagtctttacattcttctgaagttggtgggaaaatagtctttggtaatttatcttcttcattatatgtttcctttaattcacctgctttatcataaactttccaagtttcaacacctttatgtctaattaaacctggtagtctgtcagaggaatcaactaatttaaccttaccatcccataattttaaggccgctgcaacaaccgcttcattttcaattggatttagtgaacatgtggaataaactaatcttcctcctggtttcaacaattgtaaacctctctttaagatgtttaattgtaatggatgtaaaccaattgcattaccaaatctccattctttccagaccatgatattttttctcatagttgcatcaccggaacatggaacatcacataagattctatcaaatttaaggaatggaccattttcttctaatctcatttttgggaacatttgtgcatcatgattaacaacaacaacattcgcagaatttaatctcttaatttgatgaactaacatataagctctcttataatcagaatcatttgccataacaaaacctgttggttgtaaagtttcatcattagaatctttaaatgtatgtaatgcttcaattagttgggcagttttagaacctggtgctgcacacatatctaaaacatgatgatgtggttcaacatctaaaactaatggtggaatcattgaaactgcttcttgtcttgaaatattaccaacttcattttcaacaagcaaatatttttggacttgcttatattctggaacttttttaataacttgctttggtaaatcaatttgatatgctaaattatctggataccatggcaatgaaaatggtttcttatatggttttgaactatcaatactttcaacattttcaatattatctaataacggcatgattttattttgaaacaaacttgaaataatttttgcgtgctttcttgaacctgtaactctaaatgtaagtggtaaagtttcttgacaggtctttttgaaaagttcaaaattaccacctggaattaaattttgttcagtatagaatttttcccatgcttcattctcttgcttaacttgactccatggttgtctatcatctctatttccaagcttattgttatttcttcctcttctaccctttttagccatcttagatatatgtcgtatagaaatattacagagtttcttttccattaacttaacttttaatcagaaacatgtgaagaaatttcaagttgcatgaaaaaaaatttttatcaatgagtttttcaaatcagcagaatttgaaggttcgtgttcgatctttaaatatagccgtttcccccatgtatcttcatttttactttcatacgatcaattaatacactacattttaaaggacatcgttaattgaatattttacatagtaaagttttaatatctataaaaaggtttatttaaagaacaaaatcttttattatcagtctataaaaaagtgatttctataattggcttaaacttgtaacagcactggttcgatattttctgtatcggattctgaacttgattccgaacttgaatttggattatcatcactattctcaacatttccagtattaccatcgttatcttcatcactagcatcatcgtcgtcagagtcatttccggacttatttaaatcttcttcatcgtaaactcttaaaaactcatcaatacttccaactttaaccttcgtatcatccttcactctttccatatgagatttgaaagtagaatcaccacataaatcatccacccattttgttactaatgcacccaaggctaataatgctgaaccatccatacattttgcatatttttcattatattcttcctctgaaatattgagtttcttacgtatacgatcagcaacataataatgtattgaatttaaaatttcttcaccaggcaaatctacaccattcaaaaccttgatctcatctcttgttaagtacactaattcatgtggtgcaaaaccgtagttttcacttaaaacttcatctggtgatttataatgaacatcctttattcccgttggttttttaaacaatccactttctaaaaattccttctttaatttgggtacccgtgaattatcaattcgtacataatctgcattcaaggttcttggttttttgaattttagtgttgcatatgaaatgacttcaagattagatgcctcataaacacttggtttttctctagcaatacgcttcaagtttaatggtaaaacattcaacttatgtccattattagtctttgttacgtggatagagctggtactatttgactcgtcttttaatgtcacatcaatatctttctttgttgtaggaccagtttcatctacattatcttcctcctcatcatcactggattcggaataataatcagaatcagattcaccatcgtactcttgtgtgaattgttgatcggtcatttcgtcctgcaaagattctgaaatggaatcagcatcagcaccaacatcaggttcagatttaattttatttacttttttcacatttctttcttcattaaattcatcattatttcgccctcttttcaagttatgttccactgattctgtcatatcatgtatatggttccctggctaaaaaaaagatgtcaaaaataaagattcaaaaaggagtaaggaaaaatcacaattaaagatttaaaaaaaatattttattcaattcaatattttacaagcttgttcatcgtttcagattttactatatacaaattgtatttattcaacttctcaaacaagaattagataatgaacagagaagatcaaatcaaagacttaaacaaccgaatatcagaacttgccatcatggtttctgtaaaaaccaaagaaatggatagcattgaaaagaaatataataaaagattggaagttttgaatagctatatacgccaaatacaggaaaagctaaacattgacagagcaacaaatacaattaatgatacggatcttatcgagaagatcaagaagtatcatacagaagatggtgattaccttttaataccatgtaaggaaataattgaagaaacaccatcaaagataaatactacaataccaaaagtgccagaggctaaactagtcaatactagtagtcgaaagaagaaaatgtcatgctcatattgtaatgaaaagggacacaaacgttcacaatgtccgaaaatattgtatccatcactttgaagatgtttaaaaatctttaactatataattaatatacaacgtgtatagcataaaataataatgaaacatattatatttattatctaccagcaattttttcaccagcacttgccatagcttcccttctacttgcatcttgaagaagattagtatcaacagttgaaggatttaaatgaatgtatcttatatttgtacctctaaggaaaatagactttaaagctagaaattgtggatatttttcagtgtctacctgtatgttatcaagttttaagttgagatattggtcaactgacaatagagtaccaactatttggatgtcatttttcaactctacagttatctggataaagtttaattgaggaaaaatgttagtatttgttcttatttaatcgtttcaagttaataattgtcacatatacgtacctcttgatccacaagggtcttgaagaaggagaaaaaaagcatattgtgttgtgtagataacttaaaagaaacagtataatgtagtaaagaactgtctttgaacattatcatcacactcaacaaaatcatgaaaaaattaactggcaccagttagcgaggaccaggacttgctcaatgttaggaggctctgctgtattcatgcatcttttacaaggcatctagtatgttaatatctatacaattatgttatagagtagtatgtacaggaataattaagtattattattaattgcagatttattttttagtagcagcttgttggagatgcttttgcaaaatcatgagattggctctacttggtttcttgagattgttaacaagaagtaaaacacatgtaagtaacgtaagagcaccagcttgatgagctgctgcaagatcagttggaacaagataaattaatgtacaaatacctaatgcgtattgtaatgaaacaatacccatactaatattcaaccatttatatgcatgtcttggaattatagtcttgattttatgagagtacatgtgaattgcaaaaacagataatgcagatgttgttgctaaaattctatgttgaagttgaacagttgcttgattttcaagcatatttctccaccaaagatcagattgatctttaactcttgaataaacaggatcaaaaagttcatttgctgaaggaacccaatcatcacccatatgtgggaaagtattataaattaaacctgcatctaaacctgcaacaaatgcacctgacatagcagtaacgaaaatcaaacctaataaaccctttgataagaactttaaatttagataatgattttgattgaatttgttggaaatattttgcatattcttgaggattcttcatgatccattgatttcttaaaacactaaaacctgttgaaatcattgcacaataaacaataaatgctgcacctaaatgagttgctaatctatattgagaaacagttggtttagaacgtctctcttcaagcagttcagtatcaataccagaataaaccatccaccaaccaattgcaccttgaacaccaattaaaccacaaatacctaataatttaccagcagttttcaatgaaacttgtttacgtgcaatgaaataaagtgttggtaaaacaaaaactgtaccaataatacgacctaataatctatgtgaccattccattgaataaataaacttaaaatcttcaacatccatatgtgagttaagttgtttaaattctggtgattctttatatttttcaaattcttcaagccaatcttcttcagttaatggaggaatagaaccagtgactggtttccattcagtgattgaaagtacctgattcggtaagtctagttaaaccacctagaacgacaatagcaaagacaagaattgatgatccaatacataagtatccaacagctttatttgaattagcaggccaattactctttggtgctgccttagctgcatttatagtagcttcagtagctgattttgcagctgcattggaagttctaacagccgcagagaaaaatcttgaaggaattgttttaaacattggatttgaagtctttttccatatagattttgaaacagaatggttgattgctgcacgtgaagcagagataccagcggcagtctgtaccgaacgtactcctgccattagcagtgccttattacgaaaaaaaaacattgttttggctaaagaaaagcagtatcagcaagtcagagattacagcatcccaaatgtcacttagtaatgaagtatctgaccactatagttggctaagaaatttcacttttttacatttgtctcggaaaattagagaaaaattttaatctcggaaaatggagtcacgttgtgattaattttttaactttctccagtttttccaatcgatgttgaaacagattttgatactgttgctttagattgctactggttgccaagtattcttattctaacaaacaagatgcctccaaagtctccaaacaaaggtcaagagactaagaactacaatcctttctatattgaacctgagaaacctagaaattctgtatctggtctattagatgatgattttaatgattcagaagacgaaggcttagctaaagaatttccaattcctgtgaatataaacaaccaagattatcgtccatctaaaactgtgaagacacgtgctagaggatacagtttaagaactcaattacttaatactagtatgcataatcagtcaattcaatatctcaacaatgttagtaagatcaataatacgacgagctccgataacgcaaataacgatatcgaactaacatcagttgaaaactcatacaatcctgatttcattcataatgatgaggaatacgaacgaaatgataaaaacttaagatttgatactttattaactaatgaatctataatggatctaactgatgagtacacacacgataatttcgattccaaaaatagaaaaaatagaataagattaagtgatgaaacacaacaaaagagaagcatatttagtaaaatacaaaagaaaaaccagtttacaaagaaaatttcaccaggatttttcaaacgtgcattcttacttttatctggtggtagaccagaattaccatctgttggtggtagagacattccgattacaattaacatatcaaatactgatttcccagttaccaaaaataaaaagaatcaaacattacttatagatgaacgtaacaatcagccatatgtcaataatttaattacatcatcaagatacacacttgtaagtttcttaccaagacagcttattgcacaattttccaaattagcctaattgttattttatgcttgttgctatcttacaactaatcccttcatggtcaacaactggtacaagtaccacaattatacccttatcaatttttatttcaatttctatgttgcgtgaaggttatgatgatattagaagacataagttggataaacaagaaaataataaaaaagttaaagttttaaaaggaatttacggcaccaaacagtatgtttgaatcagatatgagatttagtaaaagtacgacctcaatttcaagattaagaccaagtggacaatcatttgattataactttcaattagagaatgatgcattggatcaagaactagaaaatgaagcaatcaaaccaaactctttccaagatgaacgtttactgagtggtttgggtatctctgctgttaaaacaagatggaaagatcttaaagttggtgatatagttaaattgaattctgatgattgggtaccagcagatattgcaattcttacaagtactaatgaaatgggtgaagcatttatagaaaccatggcattagatggtgagactaacttgaaatcaagaattccaaacgttgaattaaacaactatgcaaataaggccaaaaatcttttcaatatttccggaactatcacatctgaagatcctaatcaagatttatacaattttgaaggttccttacaatttcctgattttaaaacacaagaaatgaagacttatccattaggtcctgataatattatttatagaggttccattatcagaaatacagaatgctgtttaggtgtcgttatatttactggtgaagaaacgaaaatcagaatgaatgctatcaaaaatccaagagttaaagccccaaaattacagagaaaaattaatataattgttgcatttatggttttccttgttatatcattatctttattcagtttcatggcagaaagaatcttttacaataaatatgccacacttaattggtacataaatcgtgtaaatgccggaactgcacctacaatcatgggttttatcattatgtttaatacaatgattcctctttcactatatgttactatggaaattatcaaagctgttcaaatggtattgctacaatgggatattgatatgtatcatttaccaacagatacacccgctgaagcaagaactgcaactattttagaagaattaggtcaggttagttacgttttctcagataaaacaggtacattgactgataatgttatgctttttaggaaattttcagtctgtggtgttccatggatacatgatattgatttattaatgaagaaagaagaagatcctcataaggatgactttttctgatatattttcaaataatgaagaaaaaccaggtgcaataattgctccaggtagaccaagtatggcatcattaaaatctgatcctaaaagaacttttggatcaccaaattcagtaacatcaccatctaatccactggaaatcaaatcatcattggaatttattaattatattcaatctaatcctaatacatcatttgctaagaaatcaacgtttttcttattatccattgcactatgccatacttgtttaccaagaaaaattgaaaagaacgaagaaattagagattctgttgattctcttgaaccagctacaaacatgaataaaaatgatactattacagaagaggagaatgaagtggcagatgttagtttaaatccatttgatgaatcaaccaagtacacagaagaaacagatattgaatatcaagcatcatcacctgatgaattagcattagttcaagcagcgtgcgatatgggttttattttatgtgataagaaacaaaaagtagttacattgaaaacatatccaaatgggtttgacaatcaaccaaaatttactgaatatgaaatattagatgttatagaatttacttcatcaagaaagagaatgtctgttgttgttaaatttccagatggtaaacttattttattgtgtaaaggggcagataatattattatggaaagattagaagaagctaatattgttaagaataagcaacaagaattatcaaagacagtaaataatagaaagaaagcagaggcggagtttatccttcaaaagagatcaattgacaatcttagtcctccaaattcaccgagaacatcattaagtaaactgagttttaccctaggtagaaaaagttcagtccattacgataatattaattctatattggataatgatacaagaagtgaaactgatcagattattttggattccagaaaatcagttgatattgaaaacaggaaaaaatacaatttaacacaacaacaatacatcccacctagccatttgattaatgatgataaattccttattgaacgtactttacaacatatggaagaattttcatcagatggattaagaacattattatattcatatagagaattagactcaactaagtatgaagattggagtaaaagatatgcagaagctaaaacatcattagttaatagatctgagaaaatttctgaaattggtaaagaatttgaaaatagtttgaaattacttggttgtactgcaatcgaggataaattacaagacggtgtccctgaagcaattgaaaaattaagaagagcaggtattagaatgtggatgttgacaggtgataaaagagaaactgcaattaatattggatactcatgtaaattaattaaagattattcgaaagttgttattttatcaattgataaaaatgatgaatcaaattctgacaaggatgatacaatatcaagtatggatccaattgaaagattattatcagttataactgacactgagagattaatcaatgaagatagtttagcacattgtgttgttgttattgatggttctacattaactgaaattgaaaaaaatgcaagtgtattatcatcatttatttcattaggtgttaaggctaattctgttattgtttgtcgtgcatcaccttcacaaaaggcaacaatggttactaaagttcgtgaacttgataagagtaaagttacattagctattggtgatggtgcaaatgatattgcaatgattcaaagtgcagatgttggtgttggtattacaggtaaagaaggtttacaggcagctagaacaagtgattattcaattgcacaatttagatatttactaaaacttttattggttcatggtagatataattatattagaacatcgaagtttgttatttgcaccttttacaaagaattattattttacttatcacaattactttatcaaagatacacgttatttacaggatcttcattatatgaatcatggtcattatcaatgtttaatacattatttacatcattgccagttttatgtattggtatgtttgataaagatttgaaaccatcaacattaattgcaatacccgaattgtatagtaaaggtgttaataatgaaacattcaatttattcgtattcattcaatgggttatacttgcaacaacacaatcagttacattatgttttatattatggaatatttatggattccctgcattagtggataatacaacatatccattaggtgttattttgtttacagttttcattataattattaataccaagttgaatatatttgaaatgcatacaattacaaaactatcaattattgcatgggtaatatcagttgttggatggattgtttggaccatgttattagttggattatatagatctaaaattaatacaattttttatgttcaacatggattatttgaagaatttggtagagattcaacattttgggcatcaattttaatcttaacagttttaggtatttggattgattttctattttattttatttcacatttatttaaaataactgatacagaaaaatttcaaattttagagaaagatccaaaattagagaaacaattagaacttgaatcatataatgaattaaagcaaggttggacatggttacatgaatcacaaatttatgaagctaaaaagaatggagatttaagtattggaattgatattgaaaatagaggtgataatgaaggtgaaaatgataaattaaagaataatattcataatttcagatcatttatgaagaaaggttcaattcatccaagtgaaaagactgaaaatcgtaaaaggaaaggtacaatggttaatccaactgaattaccaccagactctccaagtttagttacagtttcatctaatgatgcatacacagaacagatgttaccaagtggtaaaattgttaaaattccaaaatttgaagatagtaatactaatgggttatctaacagaacataccgtaataaatttaatttaataggtaagaaacatgatgaagaagaggatggggaggaagagttctaccatgaagagaacgaagagttgaactcattgaacattgatgaaattttacgtaatagacaacagactcttggtgatgagtacttagaactgagaaacaaaaaattttgtataaatagcagtgcgtagtacgcttttttttagaaattaaaaattttatttttttcactctcttcttttcttgcagattggctgccggggcagtagtgttatatagcttacagaataccagcatttatggaatgaatcatctatagtagcatctcagaaattattacaaaaggattaaaataggaacaccaaacgtttgttgagtttgagttaatatgagacgttttaaaacagaattttatttgaaagaaaatataaataggtatcgataaattaaaatcatgtacatgtcagattaggattatcattggaaactaaaataggtaaagcttcatattataatgttcaggaagtggatataagacgcattagttataatcagtaatataacgataccagaaaattgaattaattcctagaaattatgcttaaatatacatccctgagataaggatccgttgaacaggtaaagcttcagaattgaaagtggatataagacgttacgaatcaaaatgactggagataagttgatatacatattagccgaaacaaccaattatattccaaatgttgattggaatggtattccaagtgttgattggaatctaccctatattgaattatagggccattaaatgcaaaacggatgagtttgcatataattcaggtgcaacgtaggtatattagttaggatatatcacgtgtgtataaccctctgcgaagaagcgtagattgagtatgcgtggagacgtaggggatgatgattcccatgcaaaggctgggaataactctatattagaacaatatggaggttcctatatgcaaggctatatgatttttgcatatacgaacagctgcaaggcacctattatcgagactgataatgattgcagttatgtaatttgatattacaatagtatagttaaccagagttttttacaatgatataattcatttttctctttcaaaaaaataaccagttacaatcagttgattgtattgattatttgtattgattgttgattcaaattgtaatatattgcttatgacttatattatacaatatgttatggttgtagtatacagtttaacttaacagattttttatacaataatttttttttaatctagttaatgcatacaacaagggttgtaaatttgaatgaaacttcttatgatacatatttcatttatagtacaaatttaccttttacatggctagaagtactgaatatttatgatggtttaaaggatggagttgatctacatgattgtattgactgagtagatatagcagttacaacatatttgtgttctagcctttcggatgatacagtataaattagagtttctgtttctgcttcttacagtcccatttttttgtataaataacactacaatcccccaatttttttaagaattttacttattcactttcttctttccctgcagaaaggctgccaggcaaaagctataacaacctatatatcctgtgtcttgctcccaaagggagcaattgcattggcagagcccaaaattttagtggattaatttcaacttagttcactaaaacattgggtataaaccttaaataataccctctgagaggatttatatgggtcttaaatccgtgtgaatagagatttcacaggatcgataatgcactcgatttatgtgtaacagcatttacgtatgtattacagacaatggtgtataataccaccaataaacaaaccagagttttttaaaatgatacaattcatttttctctttaaaaaaataaccagtaacaatcagttgattgtattgattatttgattattgtttataaaagagaaaccctgacttagtagtgataagataaatattttgattttcaagtataaaaacttcgcatttcccactttttcttcaatttgtaatctttctcttgattttaacttctttcggtgtcagacgtggccaccaatttttcaagcctccaaagcaggggcaaaaagtcctttatacataaggcaaattttcaaaaaagtccttaaatacaataaggcaaattttacaaatcgatatcttaattgatatcacaacaattttcaagcctcttaacagggggcaccattacaaatgatacattatcagtatcacaaattttcaaaaaagtccttttttccgaaaggcaatttacaaatcgatatcctaatacgatatcacaacaatttttcaaagttataattttaaattcaaattaaatttttttaactaaaaatttttctattcaaattaaatttattaattaatcaatcatttttacaatcaaaataaagcagctaagataacaatttacattacacaacttacaaatacaagatacaaaaatatcaacagaataatcgacgcacctatttacaacataaaataacaattaattgacaaaatatttttttaataaaacattttttaacaaataatttacttacaatttacttattatcaacttacaatttacacctgggtttttggattgatgtttccggtgttttttgggtagttttcttttggagtctaagagttttttaaacgttttttgtttttcgttttttctctaaaaaaaatattatgtttacagttagttaactgtacttagtatttgaatttaagagtaaaataaaataaattagattaaataaaatctttataaatttgggttaatgatataagggaatttagttatagagaagataataatataatgtaaatagcagaaaaaaataatgttaaaaattgtattgtaaaaagttgaatgataattattattatttttcatctttctttttaatgtaaagataattaccaatacccataactgaagcacctaaaccaattgaagcaagtatatgaattggtttaatattatcatgacaattagtacaattttgtgttgcaaggtaatatttatgataataaaatgcaaaaccagttaaagtacttaaagtaataagataaattgaattataagtaattaaaggattttcttttgatttagttatgaaagaatttaaataataatttgtaaaatcaattgattttgcaatatttgattttattaataaaattgaattattaattattgaataagtatttgatttaatagatgcaagataattagtaataattgatttaatatcattaattttttcttcctttgaagaatcatcattaattttttcattaattttttcattaattttatcagctattttatcagctgtttcattaattgattccttttcatcggaaattattttctttgcctttgatttagaatttgtcatatcgtttataataaaatcttttgaatggaaatttggtatatctaaaataactggagttttaactatattatcactattaatatcagatgattgattgttagttattggtaaatattcttcaagtgaaacaagtgttgctgttgttaaagtacttaaaattgttttagttgtttcgttagttgttaaaggaacagatgaaatttctgtatcaaaagtatccttagaacttggtattgatgtattgattggtgaatcaattggtatattttctttataatcaattacagatgtattattaataattggtgtatttataacagctgtagaatatatactattattactgctatgtattgaatttgaatttaaatttgaattagatcttgaactattgacactactagatgaaaatgatcttttacttgaacttgatgaagaagaacttgaatttgaatttgaatttgaatttgaatttaaatttagattaagtgaactttttgatttagttttatgtttatcagatttagttaattttctagtcttttctcttaaattagaactgtataaaagaaatagatgagtataggatatgagggggatatgtattaatcaactataataataatatcagatacaattgaattgttgataaaagagagtataatataatataatataattaatgaactaatagataagcaagtaatagcataaatgaaaggggggaaattttagtatattaattaaaatcagggaatggtccagtgtctaagatgatagtaaaataaaataaaataaaataaaataaaataatttttcttatcagttggtgacatctttctttatcagtaattttgatttaatattacgtaatgaaccccacttacgtaaacactgttttttcaagtaaaatggcatcatttttattatggtgtgattgaaatattagctgagccgcctattgattattatacttattagtattcattattgcactctttattaacaacttcaattgatatattaagtattagtattagtagaaggacataagaggtttatgttagtacaaggaatccgtaagaagtggaaaatatgtgtaatattgcttaatattcggaatgaattcggagtattattaagtgctgttatttctttattattgagaattcaaaataataaatagttatattatttattatagtaatacatacatcagagtcattgttagtagttgattacacgataagaaagtaaatactacaacaataaagtaaatcagtgaataaactttgaaagaaactgttaagaatataatattcgaaacttaataataataataataataataataataataaacagatcattaacagtttatttaataaaaagacaacacgtgacccaacaccctcaccaaccctaattaccgcattggggacaaccctctttttcccttactaaatttttcagcgactgaaaaacgcaaaatttttttttcatttttcattttttttcaacgtcttatagtattatttactatagtgttattgctatattattactattactttatcttataccttatactattttaattcttcctttcatttactaacaggttatcaaactaactaccactactaaacaaaaatgggtgcttacaagtatatggaagagcttcaaagaaagaagcaatctgatgtcatgagattcttattaagagtcagatgttgggaatacagacaaaagaaggttattcacagagctgctcaaccatctagaccagataaggctagaagattaggttacaaggctaaacaaggttttgtcatctacagagttagagttagaagaggtaacagaaagagacctgttccaaagggtgctacttacggtaaaccaactaaccaaggtgttaaccatcttaaatatcaaaaatctttaagagttaccgctgaagaaagagttggtagaagagcttctaacttaagagttcttaactcttactggattaatgaagattcaacttataaatattatgaagttatcttagttgatccaaatcataatggtattagaaataatgctgcttacaactggatctgtaacccagttcacaagcacagagaaaacagaggtcttactgctgctggtaaacaatcaagaggtattaacaagggtcacttatacactaaaactcaaaagggtagaagacacacctggaagaagcacaatactctttccttatggagatacagaaaataagtgtgataataatagtaatattattaaaaacttatttctctctattaccaaaccattttttattgtatagttctgtataaaagtctatctatatattccaaatacttgctgtacctataatactatgttgtcgacataatatcatcacgtgaccctataatatttaaaaatttttcagacaataataataataataaaaagtcagagtctcatactcataatcgctcactataataaattgacttggaaccttcccttaataaatttaattcatttcaatttacatgttatattaattttactttccattaaatactttcaaatttttcttttaaaactcttgcattcttccatttgtttcaacatcaattgatttcttatattaattttaattttaattctcttatttaatcaatcaattaataatgtctcaagatacttatactaaaactgcaattttatcagtttatgataaaacaggtttattagatttagcaaaaggtttagttgctgcaaatgttagacttttagcttcaggtggtaccgctaaattattacgtgaatctggtttctcagttgaagatgttcaatcaattactcatgctcctgaaatgttaggtggtagagttaaaactttacatcctgcagttcatggtggtatccttgctagaaatattgaatctgatgaaaaagatttaaaggaacaaaatattgaaaaagtcgattttgtcgtttgtaatctttatccatttaaggaaactgttgctaaaattaatgttacaattcctgaagctgttgaagaaattgatattggtggtgttacacttttaagagctgctgctaaaaatcattcaagagttacaatcttatcagatccaaaagattatccaatcttccttgaagaattatcaaaagattcaaatatttcagataatttaaaacaaactcttgcattaaaggcatttgaacatacttcagattatgatactgctatctctgatttctttagaaagaaatatagtgaaggtaaagctcaattacctttaagatatggtgcaaatcctcatcaaaaacctgctcaagcttttgttactgaaggtgaattaccatttaaagttttatcaggttctccaggttatattaaccttttagatgcattaaattcttggcctttagttaaagaattatcagcttcattaaatttaccagctgctgcttcttttaaacatgtctcacctgcaggtgctgctgttggtttaccattaactgatattgaaaagaaaatttatatggttgataatattgaaaatttatcaccattagcaaatgcttatgctagagcaagaggtgctgatagaatgtcatcatttggtgattttattgcattatctaatattgttgatttaccaactgcacaaattatttcaaaagaagtttctgatggtgttattgcaccaggttatgaacctgaagctttagaattattaaaggcaaaaaagaaaggtaaatattgtgttttacaaattgatccaaattataatccaaattcaattgaaaagagaactgtttatggtattacattagaacaaaagagaaatgatgcaattttcaattcttcaacttttaaagaatttaattctaaaaatacagaattacctgaacaagcagcaattgatttaacagttgcaacaattgctcttaaatatactcaatcaaattcagtttgttatgctaaaaatggtatggttattggtttaggtgcaggtcaacaatcaagaattcattgtacaagattagcaggtgataaagcagataattggtggttaagacaacatccaagagttttaggatttaaatgggcaaaaggtgttaaaaagccagaaaaatcaaatgcaattgatctttacgtttcaaatcaaattccaacttctgaacctgaaaaatcagaatttgaatctaaatttgaaattattccaactcctttaactttagatgaaagaagagaatggttagataaattaaataatgttgctttatcttctgatgctttcttcccattccctgataatgtttatagagctgttagatctggtgttaaatatattgctgctccttcaggttcagttatggatagagcagtctttgatgctgctgatgctcatgatgtcgtttatgttgaaaatccaatcagattattccatcattaattttaattatcagttttttaaaatataattcgatatctttttttttcatcttcacttctttaatttacttttctattcttagttacactttatattcaaattaaatttcataatataatttaaattgtgcatattttacataataataatttcgtagtaatctagtactgtaattttaataaaataaaatgttactataaaattcaaaagatataaatttatattataaaaaaatgtgtaaaaaaaatggtttgattcttataatataatgtaaatttaagttaaataatcctaacaaaattaaacttattgaaaaaagtaaatgaaactgaaattgaaattgaaattgaaatggataaaaatgtgtttgattgaaaaaaaatgaataaaatcaataatagtatataggtagattatcaaaatcttgatgaatgattaattgataatctgtagattacatgaatataataacagtgcagttaatgtagttattcaaacttacatcaattatttagtagttgaaaatgttgcaagtgtagtcttagtagtccaatgtggtttatatgaaccagaaccaaaacctgtatcattattatcttgatgtcttggttggaataaaccatctgcaaacgatggaaattccttagttgcatgaatatcaactgatttaattgaaccaacagctgcaggagctgcaattaatgcaacaaaaataactaagattgtataatataaaattgaatatttcttgatcattctctttcttaatcttgcttgtttcagtgaataaattggtggtctaatttgtctatttggctttaaccagaataacatcattgaatgccatctatcgacagctggaatacaaacaattggtaattgaagaaataataaaacatgacctaaaacaaaatcacctgcaaaatgtgataattcaacaatctttgcacagaattctcttgatggttgagtccaagctgcgatacctaaacctgatccataccatttacctgtccagaatgcaacattcgcatgatcattcttaaattctcttgttaaagcaaataatgtaattaatttgaaaattaatctttgaatatagatcattgtaattaaaccaattaacattctagcaaaatggaaaccttcaagtacccacataacaacatagaatgcaatatgaataacaactgcaataccatgagcaatacctgccataactgcacctgttttcttacaacacataccaaatagtggacctgaacaacatgagaaacctaaagtaccaaataaaacaccaatattaataacaattggagctaatgcacaaataattaatcttaaaacagaattaactaattttgcatcacgaacaccagtttgagcattaatataagtataagcaacaaataaacccgcacaataaactgcacatggaattgtatcagaaattaaaactgtagttctatgagctcttggaacatcacctgcacctttttctgaatcatcaccaatagtctttcttttgaaaccggtaactcttgatcttgataatctaacataaccaatccatgaatttctatgccacttagtattacctcttgacagccatctaatataatctctataatcaataaagtaatcttcccaagaaaattgatgtggattaaaaacaaatggtgaaaacattaatgcaacaataattgtccagaaccataataatgcaggttgccaatgtgcaattgtaccaaataataacataataacacatcttgcaccaacataaattgtaccttcagcaaatcttgaatataaaacagaaaatggaattcttgaagttgcaaaacctctaccagttgcaatatatcttgcaccaccaattgaaatatcattaactaaagatgttgaatagacttgtgcaacgaaaacttcaaataatggtgataatgatgaaatatgtttaaaaaatctaactgccatcttccaaatacctctttcaattaattcttgaactaataatggaacaaaagaaataaagaaaacaatgaaaatagataatgtataacgtctaatccaatcaattgctggcatcaaattgtaacaacctaatggatatagaatatcggtaattggcttattcttatcataaatacaaataattgattcatgagctaaggaattaatattaactaaagttaacatgaacatttgtaaggaagttgaaataaataaattattgatatggaaacctaaatgagcataatagaaagataaaaatctatctaatggtaattgagtacctaaataataatattctcttgataacatttgttcacccataccggcaccaattttagttgtgaaattcaaaattgaaccaaaacctaaatctctacctttaccacattgataatattcacaatgcttaattctaccacctctacaaagtgcagtcataccaccataaatatcttcatttaaatgtaaacctttttgtgccttcgaaacaccacctctagttaacatataaacagaatttaagaaatccggatgaccataatgtaatttaccaccaatttgagccaaagttcttgcaaacaatgtaccgaaagtttgttctttacctgcagcaatatcacccaaaatacctgcattttcggagaaaatatattctctagcaccaacgattgcaacaggatgagtaactttagcagtttcttttgataaacttgtagcataaggattaacatgttcaacatttaattcttcaaattcagctaaaacagatctaatcttcaaacattcttccagataattatcttgatttgcatcaattaattgtaaatattcacctctagtaaaaataattgcatgattttgattatcagatttaccatcacctaaaattggattaccagatatttgaaccctaaatttaggtcttcttctttcatttggcatgatttcacagtgaccatcaataagtgcggaataaattcttggttcaccaccttcctctaatggaggttcttcatctaaataagcaatttgtaaatctggataagctcttaataaaaattctgcattttctaattcttctttcttaaattttgctagtctttgcattgaaacaagaagtttaaattttcttctagccattctttcaagttctctttctaaaccttctgcattaccaccaaacatttgaacaatttctggattttcaactctatataataacttaatagctcttgcataattcataaaacctgaaacagttctatataacgtttgtgatcttaatgaagcccaaattcttgttcttaaagtatattcaggtgcagcagatttgaaaccaatacaataaaatggtaaatcatcaatttcttgtttgacatcatcctctttttcatcttcaaatgcaacagtttcttcagctaaaatcttagtatctttaacaaaacaatcccattcaattggatgtaattgttttaaatattctaataaggtaactcttgaaaattgatcatcttctctaataatttcctttaatgaaagtaaaatcttttcagaataatgaggagtgaaaacggtaaaagttggcatattatcaacaggtaatggttcaggaattggggttgctaaagattgggcaaagaaagaaattcttctttcagcttcagaatcttttgggaaaaattcagttgaaaaattattatcatcttgagagacaaagaatgttggagctcttagagttcttttaccttcaatatctgatggaacttgatgatataataatttttgaacatgatcaattgctaataaatgttctctatacattgaaataacaattgcattccaaacttgtgaaattaaaacttttggtttatatttaatttccatatcagcagttgctaaaactttagaataaattctctttggtaatcttgaaaaaatatttctccatggtgttaaaattgaaatacctaaataaaatgatctgccaactgaaaaaatggtattagttaaaatataccacatataagtatctaagaagaaaagtaacatatcagttgcatacattaaacctaaagtaattcttgcttgttgtttacataatttatcaccaaaccattgttcaccatgacatctcatatccattgttgataaatttctgataggatctctaattgataaaacaaggaaatagtaagattctgagaattttgcaccgaaaactgcaacccaaacaagatatgataaatatttatcaataccttctaatttagcataagatgcagtgaaagtttgttgaggtaaatatcttctggaattacctttaacatatgaagtaaacagaccacctaatggcatgacagttaaataaacaatagttgcaacaccaataaagaacatgacaattgaaacagctaatgcagcagttgattttaaagttaaaccagcataagcaaaaacaaaaataacaggaccaatattaacacctaataagatacataagaaaataaatcttcttgttaaatgttgagcaccagcaaaagttcttggaacatagagccattcaaaaattgttgctaaaatattgataaatgcagccacactaccacctaaagcagcagatgcccatcttgatgaagctaatggttgattatttaaaacttgaatataattatgagtatataaagttggagaattataagcacaatacatccagtaaacagaaatatgaacaacccaaattctattgaaattagtaataatatgtaaccatgatctgacttctttataagttttaataaaagtactttcccaatcgatttcacctaattgtaaatatctttcttcttgaggtaaatcaattaatcttgtttcaccaacaaacattctagctaaaccttgaggataccaaaataattgattaacatcatcataaccaacaattttatcatgatctttttcacgtttaataaatcttccatctgaaatttcataaacttgatctcttaagaaacgataaattggtgtaataactctgttaagataatcaccttcaggaattggatctaatctattttgacatgcatcagatttaagataatcataagctgatttataaataaaacataaacattctggagtaaatcttgcttgatttgcttcaccccaaattaaaagataaagagcaatttgttgaactctttcaacaggagataatctattcattgcagatttccatctaaaatctgcagcttctaaagaatcatcatcatcaatttcatttaaaacttgatcagtatttgcttcactcatatcaatatcttgatttttcttttttctacccattttaaagatacctttctttgattttttctttgcttttttaattttacctaaatcaacatttgcaaaaccaactctatcatcaatatccatttgacaagcaaaataccattttttataattagcagaatcaccaccaatataatcagcatgtaaagataataaagcttgagcaggagtcattcttgaagatcttgaatctaataaaaccataaaataatcaaacatatttctcattgaatctctttgaaaaccaaatttattacataaatcaatgaaaacatcttcaatttgttcaattgaaattggtgattgattatcagcagtccaagcaggataaggatcagttggtaaagcaatcataccttgatcatacataccattcataccattacctgcaccataataaggagttgaagcaccagaagatcttggatcaccataacttgcttgagaaggagtataattaggattattataacctccattatcataaggggtaccagggatattaccaggaccataactaaaatctgaataagtttcatgatcattaggatttggttgatcataataacctgcaccaggttgaccttgttgttgattatattgttgatttggatcatattgttgattttgataataagaatcatcataatagccttgattttgttgatttggatcatacgcgttttgatcataattttgttgattttgttgatcataagcattttgttcatagtaaccttgattggttctatgctgatcgtaattatcttcgtaagacatctataatataatatgtagggagtaagtaatatgttagtatgatattccaaagtagagagagaagtaaaaatgtaataaatacttacttttcagttttaaaatcaatactctgtgtaatataaattaatgaaatttttcctttgtaatacaagatgtgaatttgaaaataaacaacaaaaagaatgtaaatttataagataataactgaagatttaaaaattactattgatgatcaatgaatgttcagttttttttcttcaaatactagttatttactttaaagtgaataataagtagtagtaaataattttattattatatttgatataatattaatataatattagtattaataaatataatgaaaaatgataatttgacgatttgtttcttggattatagaaaataaacgagatatttaatataggacttaatttaatgatctgaaatccaaatgtgggtatatagaaactagaactatttgaggtttatcaaaaactaccttaaagttcctgaatccaaacgtgataaagcagaaaggataaaatacaactacaaaataatagaaaaggataaaagtataaggagatgagcagaagaaacaagcaaaaatcagcagaataaacaatctgaaaggcaaaagtgtttcaaacggggcaaaatgggaaagtatcatcaaccagatcaactgaaatgccatcaaaactggaaagacttgaaaaaaaactaaaaaaattaaaaaaattaaaaaaaaaatgagtgagtatatggcgtcaccacgtctatcacgaaaagtctcttagtaatattttaaaattgaaacgcgcacgcgaactagttgctaaaaataaaattttctttctctcctctcctctcttttctttttctcactttctctaaaacgcgtctcttcttaaatttcttaactcccttctcccccctgtccccctgacaattctcccattagaacatcaccttacccactaattgcttatatccgtcttttcctatgggtaagtagttaagtagtacagtatataaaagttctagaacaatttaatttttgaaaactgcatgcgccacgtcctcggagttagtttaattctaaggctatttcctacacatctcaccagccaccttaagttgatcatattttaatctgatcagatcaaatttcagatctattaatatatatggaattattacacaaatttacactaataattgcttatttagtctaatcaattcatctcttatctcttcattatctaatcctgataaaatattttcaatttcaccttcatttccaatatctttaccatatttgaaaatatatttctttaataatccaaacatattcttaacaccccatttataatcttcatcacctgcttttaatgtctttaaatctttaatcgctaatccattttcaacttcaatatacatttcattcatcttttcaattgcaatctcaaaattaaatttaattgtatccttatatttttcaaaactttcttcattaactttttcaacatactcttcttcttcttcattttccccttcattggcattagaatctgcatcatcactttcatcttcttcataataaatttcaccttcaattaaattctctaaaaattcactaacatataattcacttaatggtaataatctatcagaacttaaattccaaactttcctaataattgtaaatgtatctaaaaccccaaatttattcaatttctcaataaataataatccaattcttggttcattattccaaattcttaaaactgcttcaataatccattcctccttcatatcattatcaatactatcaagcacaaactttaatttctcaccgaaaactttttttaaactttcatcaaaaactgaaaatgatcttgatccaattaaacaaattgattgaattataactgttatgatatattcatcactattttcaacaattttactttcttcactctcattctcaaccctttcacgcaatttattaattaattcttcaaaaagttcaatacttgcttcaatattttctaaattcatataaatatccctacaattctcattatatggatgttcatcatgattaaataaataattatcgaatagtttaaatgtttcagtattggtttcaactattgcttcagtggaataatgttcataattcttatttaattcattgtcatcgaacccattaccattttctccttcaattgaatcaaatggattaattgtattattatctgcaaatgatttaccaaaaaatttaatatcatattcaattaattcttccttagttttcaatgataaattagcatatctttgaaattccttcggtaatgtattatttttaataaatttataattattaatcaataactctttatgaatcacagtttttaatgaaataaattctagcattataattttgttccgcttcacctagttcattaatattattaacccattcttcccaagcccattcaaatttgaaattactaatttgaaataaaaaccaattgatgaatttattaatattaacaaattctaattcttcaacattattatagaaataacggaaaatatcaccaactagtttactgaaaattaaaatatcattattgttattaccaccaacattattaacatttcttttacttaatgtccaattacgtccacatgtatctgcaattaatgattcaaaataaagtaatgttaatgaactatcaggtaataaaaatgctaagttaataatgtttttaagtacaatttcttccattttccaagttgatgtaaatcctttctcatattcttcctgaattttctttgcagaattaatcatttgttgtttagcttcttcttcaaaatcagtactctcctctaaattcttaattaaatcaaaatcaatacctttattcaaatctttaataattaataatttatccaatggtgaattaggttttgcaaatttcttatgattataatatgcttgaaaatttaataaatgtttggaacatgtaattctattatattctaacttaaataatacattaataatatcatcattcaaaatcattgaaatataactatttaatgatggtgaagtttcaagttcaagttgttgtctagttgattcaaatgggaataaattaataaaatatcttggatgtaaccaaattttatcaacatctgatgcaaatttactgaaatcttgatatctacttaatacttcatatgatggaacttcaatctctccaataggaatgtttactgacaaattgttcttcaatttcaagtttttcatcctcattggtttcttcctttggtttatcatcttcatccatcttttcaccttcgttcggtttataatcatcatcattatcttgttccttattaacttcatcattttcttttttctcttcagtctcaccagctgctttctttctctctgcttcaactttagctattttaatacctctttcaactaaaacagtttcaattaatggatcaacaaatgatgcaacatccataaataaactcatatcatctaaataagattcagtagcttcacaaacattacgtaaaatatcactcattttaacaattgatccattattactattgattggtttataataatcatcatcaaattcacattcaccatctttaacttgaaatttgcttgcattgttaattaattccctcagtttatttttcaattcaatattattttgatcattaactaaataaaatggaattccaataacaacttcataaaaaattaattcagctaatccacttctattttcattattattttgtaattcaattgcaaattcaattaatttattagtaaatgtgataatttcatcaaaatcaacaattatacttgatagtaatccaatcatacgtaataatgtaacaataacattccatgatttcaaatgtgccatttcacttttacttgtaaaattatcattactatcttcaaccattgcattgaaacacttcatcaattctatgtttcaaccaatcaataaaatctttaccaacatcaccattttttgaattacttaataatattaatcctgagaaaataactgatttatgtggcatttcataaataacagctcctaagtactgtaataattttttcttaaattctaaatcattccaacaaaatgctaatgtttcactactttgtgtaagtaaaattttagtttcaaatgctgaatcacctaaaaattctaatctactacaaagttcagtaactttattaaattcttcttgtggttgataatattctcttttattgtttctacctccaatacctgcaaatgattcccttactggggcttgtacaggcattggtgcaccaactggcatattattagttcctgatgcatatgcttgtggtgcatcagcatacggtggtgcttgttgttgttgtggttgaaatccttgattatacacatttccttgattataatcaccaactgggtggttggaccttgattatattgattgtattgatgttcataaactggtggctgttgttgttgtggaggcaattgatgttgttgtaactgtggtggtggataattattgtatccattattattaccgccataattattttgatatccaccttgataacgattttgataacgattttggtaaccagccataatggccaccctggtaaccacctctgtaattaccttgataattaccttggtaattattttgattatatccttgattattattattattataaccttcctgtggtggataatcaccattcggaggaggatattcaccagaaaattcattggatggataatatccatcatcctcatctgaacgacctcttttacgacttctatcgtctgacattggttgtttaaaagctgattattactgtcaataaagctattatgaaaaatctacgattcatgttgtcaagcggtcaacagagtcggttcattggaaaaaattaaaatttatcttacaagtgtttacgtaattgtttctatatcattctactgtttcttttctgtaaatgttcaacttcaagctgaagtgcttggttttcaacctctaataactctttctccgtctgttgcaatctaacatcattcattaatccattcactttgctgtctaattcatgaactttttttctttcatcagataatttatcttgaatttcctttaatgatgtagattgttgatactctattaacatttcttcaactaaatatcgtttcttacgttcttcattcaacagtttagctaatgaagttattattgaagcatattgtgccggcgtctttgttgatgaatcaaattcaactcgtcccatcttcttttatctttaatccttcaatttcactcttctttggttattatggtattatcatcagttttagtatcaatgtcattatcactagtattctgcagtttaccattcttccttaaattatcttctaactgacatctctcttgaaacggacagtgcaagttcagtagtaactaattcaagttcttgtaataacttgtgcattatcatttaacaatccacactgttcgatagtgaatgtagatgttggcagtgatgatgcagattttgtatcattattatctaaaaataatgctttggacagtgaattacttgatttaggagtttcatatccttcatcggtagcatttcttgtttttcttaatggtgataatggtgttggttgtggattcaaatttagatgcatatcaactattgatttatttggtgatggatcattgtttaaatgcagcggttgtgtactaccaagagttgtagtggagtatcttacagaatcatcaattttctgattttcatcattctctttttgcgttggtattatcatcaacataggacccgtaattattttcaaatccatcagtattcatctctggagtaaaattaagagccaatttatccaaggattcactcatttgtgatatatcaactgcattaattgtactttgactaatatcttcatcctctacaaaattttctagtttcttctgggaaacttttgcaggactagaattcaacaggaaattcggttgctgaatagaaaacagtttgttgagttgaattgtttttcaaatcatacattttactttgtttaacatcatcattcttcagcgagtcaaatgtaacaacaggattcaacctggttctcttgtctttttaactttattcacatctacggtaggtaatactggatcgtgaataataacatcatcccctgatagattatctgattcagcaacaggtgagaaatcaatcttacttaactttcttatgcttggctcttcaacatcaatccttagtttcttcagcggctgattcttcaactactgatttattcgttttactcttcttctctttcttctcctttttatctttcttcttcttttccttctttttcttctctgtcagtatatcaacattttctgtcacactacccataacggaaccaacagtattatttacagcagaagcattatgaacatcttcagattgtgtcattaattgattatacatgttctccttttgcatgtttttcaattgccaatttcgttgattaatggcattttcactctgtaatgacattgaacgtggattaaatccaggtggaccttgttgttgttgctggtgaggaggaatattagaattatatcccgggcctggtattggtcttggtcctggtaccggtcctggaccgtattgcatattcggacccatcggatttggtggatattgttgcatattcatatttgaatgtggatgcatttgcatttgtattggcatactttgatttgacatattaggaggttgaccgtagttaaaccttggttgcattgacatatgtggattttgtggtccacctggtcccataccttgtattagacccgggtgcattccttgaacttgatatcttggattcattggattttgtgaataattttgtaaactcattgaacgaggtggtggtggttgttgagaattgttattattattactattggctatattcatcattgcagatttcttttgggccatttgtaattttctatattgttcacctgtcattttattaggattagatgaaagagaagattttaaagttggaatatatggagttgaatcacctaaattaaaagcaccagctctatcacctctaatatgttgtaaatcatcaaatgtaatttctaaatctgatgcattcacatcatcgttaccctcttcttcatcatcatctccacctccatttctaccacctcttccaccaaatttaccccattgtttcttaacaaaactatttactgtagatgttgcaattgaagaatttgaatttctacgtttatgctttggccgggactgactgaatcccgattgttgactaacatttctttgaggattgtagatttgttgttgtggttgataatattggggttgatatggagattgattaaattgttgttgttgtggataaccatattgattattgtattgattttgttgggagatgtttgtaggtacattttgaccattattaccattatttccacccttggttggcatttcatagttaatatctatataggcagattccatcccaggtggcattctctctccacccgcaggagacttacccatcaaacgtgctgcctccattaatcctataagaaacacatcaaaataactaacaatttttaacaataaacttcatgcaattattttattaatactaaaaatctctgaaaaacttctctcagcgcttctttcaatagtgcatcttgactcaggaacagtatcttcctctttattatcattatgcagtgcatgtattgtatattctagtatagtatattattgtatagttacacagttaattacacagatggttcagtctgttgaacttccttttctacatctactttcttttcattaccttctaatttattagctaattctaatgccctagctcttaatgatctaccatcccattccttttcaacaaaatgtccactttccataacaatatgtccatcaacaactccaacacattgtccatgttcatcaaatactaattcactaccaacaagtttttgccattgtccaaccattgtaccatcattacttgttgctaaaacctccttttcacctaatccttgaattttcaattgattaccattaactccaccttcacgtctatatgcaattcttttctgtaattcattatcatcaccttcattttctggcattactaaattaactaaaacatcaacataatcttcttcttcactaaattcccaaactctctctgctcctttacttaaaaatgatgtttctccatttatatcaattgtccaactcttaccatcttcatttctatgaaatttatcaaatgaacatgttgcagctccaaatttatctccatctcttacacttgaatgtcctgtaattactttagataatgcaattttagtagctgcatgagttgctaacataacacattcaatatcaggatattcagtttccattctttgtaaaaataacttccaaaattcaacacatctttgaaataattgtgtttccgtttcaccttcaagtgatggaactactgtattagtttccatttcattatgtaaaattgggaaaaatccttttaattcctctaatgatgcagctgttacggcttcattggggtgaaaatattcacctaatcctctatccataataaatggtacatttaataatttggcagttggttcagctgtctgtaaacatctataaaatggtgaagagaatactaattgtggtttaggtgattgtttattaacaaattctgctaattcttttgcttgttcaagaccatgtggtgctagtggtggatctctcttaatacccgttgggatcggtagttgttcattctctggtagccagttggatctatatccatgacgtacaacgtatactgtatgaagtaccattgttatgaagaagcaaggtttgttttatacatagagatttatcttaattacaaataattatattacacaacatgccatggaattaaatacgaaatcttataaatgacttccataactttaaatactctttttgtcttcaacttcctttatttcggtactttcactcccgtttccttcattttcctttgcattttcctctttctccctcttagctattgctaattctttaagaaaccatgtaactgcaccccaaagacataatgaaataaccaataagttgataaaatgtatagagcgactcatgtatatcatggccaataatgatagaattaacaacacaaatgatccatgggttgccttaataagtgcaggtgtagtacccggtgtgaaaactgattcccagagctctgtaacaaatgtagccattgcctaaaatgaaagttatcagtagaaaggaaacctccattaagatatttaaccaatagttacaaccttttaaatgattatgtaataaattcttgttctaaatccatcatatcagtcaacaattcattaactttcctttggacaagtttcaaattcaatgccatcagtaggtaacgccaagctcacgactaaagatgttgctcaatgtgacggagagaagaatcccatgtatgtatgttggaattaaacgaacggttttcgatgtaagttcaaaccaaaaagcttatggagttggtaaaggttatcatgtattcgttggtaaagatgcatctcgtgcacttgggaaaagttcagttgatccaattgatacggatccttcagttagttgggattattcaaatcttgatgataaacaacgtaaaactttagatgattggtacaaattctttgagaaaagatacgatattgttggtacaattgttgatttaccacagtaataagtataattaatatttgtatgattctctataataataatatttatatttatataatataaaaataatgtctatttacagatacgtttgagtaatggttcaacatcaccgctagtccattcattaacttcttttaccacttgcaacagtacttaaaactgcaacttccttaaatggattttcacttgattcaccactttcaacaagtcctaataatccaaatgatctaattaacatatcaccaccaccaattcttacaagtcttttcaaaatatatgaaattttagtaataattgatggttttaaacttggtaatttaacaagatttaataattcttcaacaactttcctcatcattttcatatcttcattagatgttatacaatcacctaaattatctaaaatccattgaagttctctaaaataatcactatcttcaccacctccatgttcatccttgataaagtcattcataactctcttgaataatggtatttcatatggtctatatttacttccacttaaaatatatctgtatgctttctcatataggaaatgacctggattatttaagactggaattaaatatgataacatcattatgaataatttaggtacttcaatattttcctcagattcatatgtgtatagtaaattaccaaataatactttaaatgcagatctttccttaaatgatgcaacatgtaattcttcaatattattagttttattttctttatctttacgtttagctaaatttttaatatcatcatctaaacttaaaacaatacaacttattattctctttgaaatcttttgaatatcctttgattcatgtgctaatccacaaacaactaattgtaataaattagtttcaattaatgctctcatgttaacttcaatgatttccttcatcttgaataaatcttcattattaacaattaataaaaggatgaattcaatatcataaataataacttgtgattccttaatttcctaaatctttcaatttatagaatcgttgaatttctctaaaatcttcagtctttactcttaaaatcattcttcaattgtaatccttcaatacttgattctgaacaattaatatttttaatagtttctaatactttttccttataaatagtaacagttaatgaattactcataccaggagtttcaataattaattcaggaataccaattggtttctcctcaataaaatcccaattgcttacatattgaacccaactttcaccgttttcattttcaatttcttcaaacaatgatttgattattaaatcacttgccataattgtacctttatacattttgaaaattttagaaataatttcatatgaatgtgcaaatgatttaatattcatcttaattaacattgaaattaaaacagctgtataatatttaatttcctcaattgatccattcataccattttgttcattattcaaaataatattaattaatttagtacattcaataatattttttgaaccactatgaattaaccaaacactatattttaaaatatttaaatcattaatccaatccttacttaatataacttctaattgtgaattaagcatatttttaggaacatgtttccaaattgatacattaacagattcttgaagacattttaaaaattcataaaattcattcatttaaaatttcacgttctgcaaacattttagtaatatataaaactgctctgtataaccaattatcaataattggatcatctttgaaaattgcaaatataagactagtcatttccttggagaaaattaatgatgcaacatttctaactttaggtgaatttattaattcttttattaaatcttttgcttccctgaaaagtccaggttgctgcataaattctatatgagaaaagatatgtatttaatgatgaatcaaaactatcattttcaatcatttcacgtacttttctatatgcaatgtcaaataatacttctctgaaattaatttcatatcttgataaaaattgtaaaaatttaaaaccttccattgatgaaactatatcactatttactttcaaacataaaacatttaaaatttcactatctagtttacctgcattttcaagtattttaaataaaactggatttgatgatttatttgccaattcaacaatttgtaaaatttcatcctcagtgaatttaaaatctttgattaattcactaaattgttcacattgttcaccattctttataatttgcataatttgttcaaatgataatttaattttcttttcaattgcaatattgactaattgtttcatatttgaacctttcaataacatttcaacaatttgttcattagataatgtccaaacataacggaaaatacatttcataacattatcatcaaatttattttcaatcatcatattataaacgaatatctcttaatgaatctctaaatttaattttactgtgattgtttccaaaaagtttcgaataattcattcaataataacataaccattgatttcttctcaataatagcatttgattcattctcaataaccattagatttcttccaatatttactgttagtataattgacaattatcaatagactacttcatcatccgttgaaacttgtgaatatttttgaattatgtaattaccagtaaattgaaattaaatcaaccaatgtatcttcaactttacttaattcataatcactatttgtaattgttaatattctatctaaaataggcaattatttcaatatctgattgtagaacaatatttgataatttattctttaattcattaattggtgtaaatgcaacaatggagaaagtatttgaaatactaaaattattttgcacaatacttttttcataatttgataattgtaaatctaattcaaatccacgatactccttaactaataaattcatcaattctaatgattcaccaaccaagaataattgaacagataacactttaatgaataaatcaacaatttttttaaacttattatcgacaaatgcagcttgttcacagaaagcaacaaagaatggtgaaactctaccattttgtttctttgtaataatatctagatacttataaggtgttttaacaactctagagatagtttcatctagtaagctacaaattgcaattcttgcatcattatcaatttcattaaaaacataacctattgtattaaccaaagtccaaggttgtgaatacataaccatattatcatttaatttaaaatcttcaaaaactaaagtatcattgattaaattagttaaaacattcaacagatttatgaattaatgttgaatcaatgactttattaccatttgattcaatataattgtaaatcataaggtaatttaggcaattattgtgaataatgaatttttaccatttgtttgattccaccatttagattgagaatttgaattaattgttgttaatgataaataagtattaaataataataattgtaaatctgacattttcttttcattatttgatgaatctatatcaattacttcattaattttttgtaattgtaattgaattggtatatcaaggtaattatgataacattctgcaattttcatataattaagtaataataatttatttatattttcagattttagtaaatcattagttataccaacaaataatgaagcatctggtaatttgagattaattaaagaatcttgaatttcattaataatattgagataatgagaattaccatccaattgtaagattttaactattttatgaaatttttgtaaaacagagatgatcaattgagatgataaatgacgaattaatgaatgttgagaatttaaaccttttgataatgatgatctatttaatgaagatggacaaataatttccattaaatgtttagcagttaaacctgttgaatttgaaggattttcaataaattttttaatcatgattgtgaaattagttggaattggtaattgaataattttagtaagtaataaagtttgaccaatatagaaagaagttaatttaggatcatgagaaccatttgaatgaaataggaaagcagtataaggagctgaaagttcagaacatgtttctaaaatttggataataagtttaagatgaatattatttgaccaaggatgtaataatgttaaaacattataaataattttattattaattttaaatttattctcaccaattgagatagtaacaccattattattaaaatttgaattattatccagacattgtaagggaacattattaaaataagttctataatcatgaaataataaaccatttgattcatctgttgttaatttaattaataaatcatttaattcatcattaacaccttcaatttcatataaatcaactaatttatataatgtaaaatcacctaaaattttacatttagtcattttcctaaatgctgattccattaatattttttcatcaataaatttaataactaatttaattgtttcgatattatcaaattcattaataaatttaaaccaattattattaattttcttattattaaccaaaagatcatttctagttaatggtgaagcatttgaacataaacttatccaaaatcttgacataaaatgtctaacagtaagatggaatttaccctgtttacataatctaacactagtctttgtagggaagaataaatccgctaatgatttcaatgataggtcgaaagtttctaaaaattgatcaacaaaaaatccgttattaaaagagacgatatttgttaataatctcaatgctggattagttatagttgaatgttcattatttaaacatctatagaaaactttaatattatgaattgagataagttctaaaatcaatagtttaatagatggatgaagttctgcatgattatttgcaaattctataagcttagataaattaacattaatagcagataatgcagtatgatcattagttgtagctgaatatgattgaatttgaactaatgataaaatatttgaattttcagataataatttattgatttgaattatagatttctctatattttgtaaattatcaactatatcctgtaactgcacctacagagtcagtgctgacattattagaatacttagaaaccattgtattgtcccctaatgaaggctctgcaaaaaaagaaagctcatctacaatagataaaaattttcaacttgcctaagaaaggcaagtaaaataaatttatttttcatgttgacacaaagtacgcggtttatctacagcttctactgctgctggtaggtactctcttctattatcaaggtatagtatattaccatgctagggttgacgttgaatagacacagacaacggcctaggggagaggacacggttcaaccgagagatgtgcccgggttttctaaatgggtagctgcagaggtttatgttcatgataaactagctgaatcaacaatggagaaattatcaattacaatgggtaataatattgattggattaataatgtaatgaatgaaattgatgatattgataatggaagtgaagatatgtcatttatgttattgaaatcaccaaataggaaaagtccaattaagaaagataatgctagagaattagaaattatgaaaactacaacttcaatgatacttgatgaaccacccaggaatataattgaagaattacatataccaactgagaatatagaagattcatttgatttaataagtaaagatatacgtaaatcatatgctgcgaagcagaaaacattaagtccaaaacatagtgtaagtgtattaagagcagaggaagagattaaagaattatcgagattaattgatgcaaaaagtgatgacagtgatgatgatgatgataataataataatgattcagaaggtgatataacgatggataggacaaataagattgatactatcagtaaaccatatcaatcaccgataaaattcccagaaatgccacaaattgaaccattaacattaggttcaacacgtaagaaatcacaagtactgaaaagaagaaaagataccaataaagagaaagaaagggaaagggaaagggatagagatagagaacgtgaaagggaacgtgttagtaagataccagtacgatcgtcaggtattatatctaaaccatttggaacaccaacagtatttcgagaaactctgagtaaggataatcaaagaagatttgaattaaacccattacccaatgctacatacggtgcagagaacacatcaatggatgaacctactattaaactggatcgtaagaaagttataaagcaagagagagaacgtgaacgtgaaagagaaagagaaagagaaagagacacaatacaaacacagtcaattaaacgtgaaaaaatcccattaacacgtaaaagtctcaaaacaacatccaccactactactacacctaagatcaaacttgaaacaagtacacgagcaacattacaaccaatacgtaaacatacaccacgtatatccattgctaatgattggtttgaagaacataatttagagaaattactagaacaacagagacatactgatccaattacgatatttggacaacctcccaagatgcaactagagcagttcaccggagagacactcagtgactgggagtacagtgagagtgaagaacagcttaatcactaccgtagttctatgaagtataatgtatagtaatttaatctaattaacgtgtcagtaaacaaataaccgaatggggaaagagcgccaatttgaaaattttaattttactttattgttttaatttctcagtagtgttttacaactgttactctgttgatatagtggttggtattggtattgattggttttagtatccactggctcagtttctatcacttcacagtacaatgcagatccatgccgatgagaatgaaaatatcccactcaattcccgtgttaaagaggggaatattgttcattcatcaagagaacgaagggttttaggtggtaaggaaaatatcaataataatactttaactaacaatgcaataagtgtaacgctggaacgacacaatcatggtattgttgaaaataacaataatcatattttaaaagaaactgatgatgaaggtagtcatttaactgctattagtggtacaactatttcttcaccatttattacaaaacatattgaaattaatcataataataataataataatactaataataataatgaagcagttactaatgaaaaggaaaatataccagagagatatgaagaaattgaagaggataaatcaataatggaaagaactgatgaacaaattttagatgaaagtagacgaatgtcattaaagagaactgctccattagatgatgaagatggtgaattaatggaacctgatcaaactcaagaaattaaaagagttagagttgaaaatgatttaaataatatagttgatgatatagttgatgacgatgaaactgatgaattaaatgaactaaatgaattaaatgaagtacataatccaaggaatcaaataaatgatcaaaattgggatgatttagattcaggtgattttgatgatccattaatggtaagtgaatatgttggtgatatatttgaatatttacatgaacttgaattgaaaagtatgccagatccaaattatttacaaatgcaaagaaatttaagacctaaaatgagatcaattttagttgattggattgttgaagttcatcttaaatttaaattattacctgaaactttatacttatcaattaatataatggatagatttttatcaaaagaattagttcaagttgatagattacaattattagcaactggtgcaattttcattgcagcaaaatatgaagaagtttattcaccttcaattaaaaattatgcttatgttactgatggtgcatttacagaggatgaaattttaggtgctgaaagatttatacttgaaatacttaattttaatatgagttatccaaatccaatgaattttcttagaagaatttctaaagctgatgattatgatgttaatagtcgaacaattggtaaatatttattagaaattacatcagttgatcataaatttattggttatttaccatcattatgtgcagcgagtgcaatgtttatatcaaggaaaatgattggtaaaaatgattggaataataatttaattcattattctggtggttataaaataaatgatttccaaaatattgttttaatgataatggattatttaattagtccaattattcatgaagaattttttaaaaaatatgcttcacgtaaatttatgaaagtttcaattttagctcgacaatgggctaaaaagattaatagagaaggtaaaaatatcttagaagatgatgtatagaagtaaataaataaataaattaatataagaataatattatatagctttaactataattttttagaaaggaattatgatcttggttcccaattattattataaattggcttttctctctttgcagcaattaaatttaaatcttgatatttataaccataatatgtaagtccaacaggaatagctgcaaggaataaaactgcaaaacctgcagattttaaattaaatctataatgtttaattaaattttctctaaattcactgaatttttcaacttccttatcagcatgtaaaactataataaataataattagataacaaatgttagtataactgaataatccttataagattaaataacttaatacatacgatgtctaccaaaatgaccagccatgattgtccttactcttcaaaagaaacactgttaaacacccctcaattcaattcatgttgttaaaaagtgaggaaaagctataataatatttcttagtattattatcacggtgcacggtggaattcatcttttaaagtactacttcctcttataaaggcaatgtttaggaggttatatagtagtaaagtagttgattatatatcattattccctaatagtataaagaagaataatgcaattgatgttttcagattaaatactaaaaatttaaggaaagaatatcgtcaattacagagtatttcacatcctgatttaaatagtaataaagatgaacaatcatcaattattaataaagcttataaaactttaaatgatccattaagtagatcacaatatattttattaaaatattcaggtattgatttaattaatgatacaattggtaaaagtatgcaatttgaggataaggaaatgttaatggaaatgatggaaattcatgaacaattagagagtattgttaatgaagatgatgttaataaattaaaggatgaaaataatttacgtataaatgaacttataaataaattagatgaatgttatgaaaagaatgattgggatttagctgcaattacaacaattaggttaaaatatgcttataatattaaaaatgcattgaaggaatgggaaattggtaaaccaattgcattaacacattgatattggagtatatatatatatatattatataaattatataattaaaaacaaattaaagtaacataaaagtaattaatatatttaaacaaaaataattaacggagagttttttttttcatttttcaaatttttcatcatgaaagaaagaaagaaagaaagagtaaaattaagataaattagtatatgaataacaaaaaagatattagtaatagtattaaaattagaattaagattaaaatgtgggaaataacgaacaagaataataataattgtcacaaatttgaatgaaagattgttagaaatgggggtatcacattaaatgaataatttaattataattatcaactggttgtaaaccatttttaacatctgaacgggcattaactggagtaaatgataaaccacctgaaggagcagtatttgcaacaacttggagtatcattaacattattattaccactaattggtttattaaaccaagtaacaaatttactttgctttttaattggagtttgttcaatatcaacattttttgaatcataatttgaatttgaattataattatcattatttgaaattgaatttttatttgaacttttagtccatttagcaaatgaacctgaaaggaataaaagattaaataaaattaaaaagaatgaagtccaagcaactgccattgtctttgtaccaaaattagtatcagttgcgccatcatctctaaactttgaacgacctctagagaatgcagcagttgataatgaaataccaacaattgtgaaaataattgctaaaacgtacataatccaaaataatgaagtgaaaacagcatttggaatgaaaatatgtaagaaatatggtaacattgaaaaaacaacaaatgctaaaccaattaatgtgaaagcccaaccaattctacttgtataataataataattagaatgatcaataaatgatgatggtaaatcttcatttgaattgaaattcctatcaggagagaaaggataagcagcaactgcatgagtacaattagtattttcaccattttcaacagcacataaaccataattagtccatctacaacgtgaattaaatggagcaccaggatatttggaacaatcagtttctaaccagtacagtttctttaaaattgaagtttgagtaccacctgtaagaattgtaaggaaaagtgttaaagctgtacctaagaggagtaaagttgctattgtagctgaaatatttctaaagattctcatttgcttaataaagagtttagttttgtttaaaagaatagaagtaaattaagagatagaaataatagccaaatagtaaataaataaataaataaacaaataagatagaatataatctaaggataggaaaaggatatgacaattacaataaatttaactataagatgacataaaaaaggttactgtgacaataacaattgacccaatgcagtaatgcaatataaacaggataggaaatatgtatacatcatttaaatgaaacagaacagaacagaatagaaactttaaaaatgaaaaaatgaaaaaaattattttctgtcaatgtcaaagtcatcaccttacctaccacttaatctcttccttaccattactcttcagccattcattactctttaggaaatgaccttgggtgaagaaccctctgtatgcactcaatggactcgggtgtacaccatgtaataccattataccctccttaccttccttattaccatttgtaacactattaactaccttctcagcaggtttaccccatgctataataacaacaaccgcctgcactgccatcaccctctgcaacactgccatagtaaacacctcccagcccattttcgcatgagaatgtgcctgtcccttcctaacagtaagtacagtattaagtaataatacaccttgttttgaccatctagttaaatctccactaatgggattaatatctgtattaggataatcattattaacacctttgaaaatattctttaatgatggtggtagtttaatacattctctaacagaaaatgctaatccatttgcttgattaggtccatgatatggatcttgtccaataattattactttaatatcatcaatagaacaatcatttgtccatttatagatatcctcccttggtggataaactatacctgtctctttactcaatgattgttttagtttaatgaaataatccttagtaaattcatcctttaataaagtaaaccattcatcaggtatatactttatctcttcatcaagtaattcaacagtttctttatctaaagatttaataaattctttcttaacttcactcaactctacttctacttctattcctgtctttacttctttctttacatcatcatctttctttgctttcttactcacagtgaaatactcactgatactcctcttcatctctacttcaaggaaaaactcccttattctcttctaactgtaacttaacttatacaacgcgattgattaattatacagaggaagtcttctttctatataccattactactacaaacaatgtcaaaatggtcattatggacatcacaatcaactacaaatccaacagaatcaccaattgatcaaccacatcaacaacaacctgatgctgcaaaatcaaatgtttcatcatctccaactccttccataaataaacctcaagatccaaatatttcaaataatattgtattgccctcaattgaagaatcattaaataaacctccaatttattataatttcataccttcattacttataccatcaaattctctttatattaaatcaaaaccaacagttttcaaaagagttttaattattggagttcatggatttttcccaaataaaatgattagaccattaattggtgcaccaactggtacatcaatgaaatttactcaagttgctgaaatggcaatacaaaattggtcattgagaaataatatgaaagttgaaattcaaaaaattgcattagaaaaggaaggtaaaatattaaatagagttgatttctttttcgaaattttgaaaaattcaattgatgatattaaaaaggcagactttatatttgtttgttctcatagtcaaggttgtcctgttagtattatattaatgaataaattaattgaatttggtttagttaatacaaatttacaaaaaatttcaattttaggtatggcaggtattaatattggtccattttatggtatggataaatcacttttcattagagcttattcaacaattgaaaatgattcattaatggaattatttaaatttcaaaatttcgaaagtttacaaagtaggaaattattagaaagtttgaaaaaattagttattaatgatgttaaaattatattagttggttcaattgatgatcaattagtacctctttattctgcattagcttcacatattcaacatccaaatattttcaaagctgtctatattgatacatcatcaaatactccatcattcctttcaagaattttaaaattatcatgtattttaataaataatggatattcagatcatgattttattaaagagatttcaactccattagcagggtccaattacaggtggtggacattcaagaatttataatgattcaaaagtttataaattagcattagatttttcattgaaaacttattcatcatcaaatgctattaatcaatcattaaaatttaaaccatttgatataactaaattaggtaataattcaaatccatttattttaccttggtgtacaagaggtttattctttgaagttattaaaaaattaccaaatggtagaaatgaaattgataatgtctttaatgaatttaatcaatggaatccacaatctaaaatcttgaaaaatgttaaatacagacttaacggtattaaggctaagttataatacttacgagtaactacacccccctcgctaagagtttcccagtgagtgagaaaattatctcggaaatacgttttttttcattttttcatttttcaccatcttttctttttttctctactggaaaatgatgattagaatcagttaacggtccgttgatgttttgaaaaaagtctttattctttctttcctttccttttagcaaatgactgaatcagcatctcaaaaaatatcaacagcaggtgggtttatagctggtggtttagcagcatgtggtgcagttacattcacaaatccaattgaattagttaaaactcgtatgcaattacaaggtgaattatctaaaaatgcaaatgttaaaaaaatttataaaaatcctttccaagcattatcattaatttataaaaatgaaggtattaaaggtattcaaaaaggtttagtttgtgcatatatttatcaattaggtttaaatggttgtagattaggattatatgaaccaactagaaatttaattaattcaattttttatccaaatgaaattaattcaaataaaattcaaaatataccaattaatataatatcaggtgcaatttcaggtattgcaggtgcaattattggttcaccaatgtatttaattaaaactagaatgcaatcttattcacaatcaattaaaattggtgaacaaactcattatacatcagtttatcaaggtttatcatcaatttataaaaatgaaggtttaaaaggtttattccgtggtgttgatgcagcaattttaagaactggtgcaggttcagctgttcaattaccaatttataattttactaaagatgaattattaaaatttgatttatttgaacaaggtcctgcacttcatttatcctgcttcaggttattgcaggttttcggggttggtattgtaatgaatccttgggatgttatcttaactagagtttataatcaaaagggtgatttatataaaggtccattagattgttttattaaaactgttaaatctgaaggttttggtgctttatataaaggttttgaagcacaaatgttaagaattgctcctcatactgttttaactttaatgtttatggaacaaacaatgccattaatttataaagttgaaaaaatacttttataatataatataaattgtataatagaatcaaattaaaaataaaaaaagagtatacctattcatctctattgtaggataatatgccactacttgcattatttacttcatcattatcaccatcaccatctgtagtattgttagtggtattagtagcttcattatttgtactaccttcaacattggtattattaccattactattaccatctgtaattattcccttcacttgtttgagtaattggattatttgcaggtacacaccaatgtttatggaaaacccatgcttttgtttgacattcccttgaacaatattttgcctctttacatcgtctacatttagaaaattgttttgggtgatcttcccatttaccacaactaaaatttgcacattgccttctaccacccattttatcatctcttctatttgcatttctaacaacaactgcatgcccaataacaaatatcatcaggaaataatgatttaactgtaaatctttcaactaatgggaaaatatttaatgttacaaatggttgaatattattagtcaattaattttgatttttcaactggcgtctcaaattcgtcccatgaattattataatcccatttatttgaataatttttcaatttttccctatacaaacgtttatttttatttcttagtttacctaatgattcatattttaatttagttgtatttaaccttattttttcagttattttaattttttcaaatttatcatcactttcaattattttgaaataatcattgactatatttttatcattattatcacttaatttttgtaaatttttaagtctttcttgttcctttattttacatgcatacatatttaaatctgatattggagcaattggttgattattatttgtaagtatattatttgtattgttattggtattggtgttggtattgacattactattattattattgatattatcattatcataaggaaaaccagataattcatcatttgatgattcattaattaaatcatcgacatcaatatcattattattattatcaacttctaatggtggaggatgatttctacttctaaaagataatccatttataagataagtatttgataatgggattcttaaataagtatattttgatataaatgctaataattgtaatgaccaaattacatcatctgcaactggtaatattaaaccattttcaaaacttcttggaactgattgattaattggaactaaagcctttaaaccacctaaatatgaattaaatggatctaattgaggatataataaattagaaacttctaatctttgaaacaattcatttgatgacataaaatctcctattatatctttaaaattattattaacaaattcaagattagtattatttatatcattatcacttaatttttggaaacatttagctaattcaattacattcagcaattcaatttcttcttcagctaaaggttttgaaattattaaagaatctgaattatttctactattgtttaataatttatcaatttcatcatttgcttctaacattacatcatcagcatcatgaactgaatttctaatttgtctaaaaacatttgaaatttgaggatcttcaacttcattattatttataattatatcagtatctaatggatttatatcattatgaatgggatgattattatgattatcagtatgacttaaatttggtgaatttaatggttgggtattattagtattataagtatcatgtttatttgtagtagtggtattattattattattattattatgtaaattttttcttgttaagaaatgattatctaaaatagttgctaataaaggtattataccagcatcaactaattttttcctcattttttcactacctctggtaccagccagaactaaacattgtaaagataaaacccatttccaagcaaacaagatattatcagaattattctttggatcatgacattcatataaaatttcaattaatctttcaattgcaccatctaaaatcattgcatcacgtactttaacagaagttgaagttaaaaaagttaaatgatttaaagaattaactaaagctttattatcagtacaatctaatgctcttctatcataaactgatgaactaatagatacagttgctctattaagtaaaactgatttaccattgggtcctttcatttttttttattattaaattttttatcataaaatattaatatgtgtaatatgtgtaatatgtttaattgttaacctaatttaatgtaaatataatagtgtatacgtatagtaagtagtcgtatcgttattaaaataaataaaccaagagaaacaccaaacaagccaacactaaatgaaatcaaaagaagagccttcaattcaataaagttattttatttgccttccattcatcatcctccctctaataatttataatttctcttaaataaaataattcgctacaataaatccggtacacttacctaattgggaattaaaggggaattaagaagtaaagagtattacgtaatgcttgattatgtaatataatactttggggtcgattgcgtctatacatgtttatattactacttaacacagtatacattatactaacaattcactaccattattacccatgtaatcacttaatgatgaaactttttccttccatatctccattttatctctcatactagtaatttgtttcaattgtcatagttcttggttgcatccatgtaatttcaacttctttattaacttgattaattgtacctttaattaattttaaacttaaacttttcataactaatttctcaatttctctatcttcattatttaaaattggaatatttgataaaatttcttcatatttaatacatctattattagttggtttattgaaaactaattcaataaatgccataatacaaactttttgctttaaaaagtcaattttattgataatatcaggtaattgtttaatctctttatcattattaattaattcttcaaatttctttaaattaccactatttaatgataatactaactcttttaaccattcattatttaaatattggaaaatttcatgcattataatttctccaaaattataaattttatcacctaaaattccactaattgcaatatctttaacaattgattctttattatttaattcatttaaatttggaatatatgataaaaataataaacaattatgataaaatgaattaaaatcacccttatatttcattaattgtgatttaatataataataacttgaattaactcttaaatcaactgttgatgttaaattatcaattttattctcattggaatcaattatattactaacttcatcaataaatcctaattctaatttaactttggcaataatattatctaaatatattaatgactgtattatttcaaaatcattaatatcttcatctcctgaactatgagatttcttctcacctaatttatgaattcctttcctttaaatttgttaaatattctaatgattcttgtggagttattgatgaattatcatttaatgataaaactaaaaactcacataattgtaattgattgatcttttcactaaaacttaaaataaatctatcaaataatcttaatctaattgatttagaattttcattattatagatatcattctttaaaacttctgataattgataccataatttacgttcataataatcttctaaaatatagaattgtgcagctaactctgcatcttgaagttcaacttcatctcttaatgtaactagtatagtatttgaatcaatatccatcttggttaaaaggaagatctatcgtaaagttatacttcaatttgccactcttacagccttaacacaatatccattgaatttctcactcattttggtgtacggttcgcttctcctaaaaaaaatatttatttttctttaacatgaaaaatttatctctgataataatattattaaggaaaagacctgatctttaaagaaagtctgcatctgaagaccataatcagttagtatgagttccatggataaactgttggatcattatgctcctattttgaaaaatttaattagatattcatcagctgttaatgctaaagatattaatttttataaaagtatagaatcttcaataagagattcaactaatgaaattaatgaaaatttaattgataatatgaattcaattttattaagtgcatctactgcaactcctgatttatcaaatactttaaaatttcaaatcaaattcaaatgatgaaaattatcaaattttatcgaaaactttagattcattacttgaaaaagttgaaattaatttagataatcattataaattgaaaaataataatttaaaatcattatcaacaaataaaccaactatatcatctgactttgatgatggatatacttacttagataaagatgaaacattaggaaatacaactcccagttcattaccaaaatcaaatccaaatatggaaaaacctcaaacaaaattccttggaccagtaaataattttgaaacaacaccatttaaaccattaatcaaatttaaaccaaatgctttaaaacctttagatgaatcattaactttaattgatgcaactgatgaaattcctcaacattatgaaaatccatatttttatgaaataatgaatcaagaatatcctgaatggattttaaatccagttgaagaaaatgaatcatataaatcaattccttgggttggctcccccttagctacttggattgattctcctgaacaattagatgatttattaactgaattaaataaatgtaaagttattgcaattgatttagaacatcatgattatagaacttatcatggtataacatcattaatgcaaattacaacagattccgagaaagattatttaattgacccactttcaccaaaattacgtcctcatttaactattttaaatgaaccttttacaaatccttcaattattaaagttttacatggtgcttttatggatgttatatggttacaacgtgatttaggtttatatttagtttcattatttgatactttccatgcaagtaaacaattaggattaggtaaatattcattagcttatttattagaggaatatgcaaaatttcgtacatcaaagaaatggcaattagcagattggagaatacgtccattatcaaatgaaatgagagattatgcaaaggcagatactcatttccttattgaaattttttataaaattcatggtgatttattgaaaattccaaatgcattacagaaaactctctatgcatcaaggaaggttgcaactagaagatttgaatattcaacttatagaccgaaaaatttatcaatgaatagttcagctcaagttgttacaacttcaggttctgtctctttgaatgataataaaatttcaattcaattaaattataataaagatttaccttggacaaatttaattttcagtaatggaatacccttagagaaacgacctttattagaaattttgtataaatggagggataatcaagctagaattaatgatgaaagttcaagatatataatgagtgattatgtacttgtttcattagttaatcattttaatgttaattttgatgttgaattaattgatgttaatttaattatgacaattataaataatgcatctaaatttggtggttctagttatgttagaaaattaattaaagaattaacacaagtcattaaagatgcagttattgaaattaagaaaattgattttagtaaaattcttgttgaaaacgataaatctgataaagttaatgataatagtacttcaaatgataatgtcatagatgatgataatgaagaaaatgatatctatgaatctgttaaagatgttaataaattacaagttgaatttaataatttctttcaattttataatgaaaatatacataactcaaatggagtacaaaagatagacacagttaaaccaactgataagaaaatatttgcaattgaatatgataattcaggtaaacctaaaacaatcacctctaactcactcaatgaaagagttgaatcagttactgaatacttccaacgtgatatgaatacacaagttgaatttgaaattgataatgaaataattgaaagtgaaccagaagaggaaactgttgaaatagaggaagatacaaaaccagttgttaaggaacgtgatgaaattattacacttcgtaagaatgttaatgcaaagagtaagaaaagaaaagctgaagaaattactgatattagtgttgattttaataaaagtattatgggagaacaagaagatacaagaaatagacgtggacgtggacgtaaggatggtaaagagaagaagaaaccatcatttgatccatatagtcgtgaagttttagatgatatgaatatcccacaattaaagaagaagaaaattgttgataggggtaagaatattattttcaaaaagaaatagagaaataaagaattttgatttatttattttacaatatatagtatagcataaagtatttataagatatctatttatttaagttatttatttattaaacacttactttcttttaatgattcagggttgaccttgtaataaagtaaaagttggagcttgaagtttatctctaccatttaagaaatctaattccataacgaaacaaaatcctaaaatattaccattacatttttgaaccagttcacctgcagcatgagctgaaccaccagttgctaaaatatcatcaacaattaaaacatttgcaccttctggaattgattctttttgaatttcaaagaaatcttcaccatattctttagtgtaaccaactttataaacatcaccaggtaatttacctgcttttctaattggaataaaacctgcatctaaagctaatgctaaagtaggaccaaaaagaaaacctcttgattctaaaccaacaatataatcaatagtttgattgaaattttcttcaatataaattttaaatgcaacaattaatttattgaataattgtggtgatctgaaaagaggtaagaaatcttcgaaaagaacaccttcagttgggaaatttggatattgatgaagagcagatcttaattcatcggagagtgcttgaagttcttcgttaggcgtgcatattgtgatgactattaaatgaaatttcttcaaaagaaagttaataattaacgttaagattgaaaatatacgactactcagtaccagtgaaacatgtcaaaaatttctgaaaataattttttttccatcgctttttcttttcttttatttattagtaaggctactctcttcattaagcctgtgaaaattggttcttttgtatttctataggtatatcttgtatcatcattatagtgtttgaatctatgtttatatctattctcattcatcttttattagtatacctttccaaactctgaaaacctcgtaataccaccttaatatcatccatttcactggacctattctcttcggtgaaccgatccgcttgccgcgtacacgtccggctggctgtgcagaagtacttaacttaactaaacttaactttaacattatattaatacaaaaacactatttaaacattattagtaaaagcatttaatggagtatcactacgacttctaccatccaatccttcatcacgtcttctgctttccctagatttgaaaacaacaaaattatcctctaaaatatcattcataacttcagttatataataaaatccaccctttgatgtccacgaaactgaattttcttcataaataaattttgatgtctttaatctatttaaaattgatgaacaattatcccaattgatcttatgtgtagctggaacaattggcttcaaacttataatcttacatccaacttttaaatcttgaaataattcaataacttttttatttaatttattatcaaataaataattattaactaatataacattacatttatcaacaattttcttaactggtggattatcaataaatgattccttggaaaataatttaacaaatcctggattaataccaaatactttacatctattattaaattcaactaattgataatcacctaaaattgatgcattttcaacaatttcaactccataactttcacatccaaattctaatgctgcttgaataacacaagttaccaacccctgatcctaaatcaataaaacagctcttattatctaattcacattgtttatacactgttgaaaggaaacttggcattaattctccataaacttcatttgagaatgctttgtaattacttaactttttagaatctggtaaaactcttctggaataacattgattcaataattcataaattgcaactcttgaaaatttattcttattttgaacatattttaaaattgatccattattccttaaatcatcaattaattcattatattcacttatacatttcattaaattatcgagatcattttcctcgaaagctttaatatatttaccaacaatacaatcatttggatcatctaaattcataacttttattttagcttcatcaggtaaaaataatatacttgtcagttccattaatttaccaatttcatcaaatggattaaattgaacatcatcctttggtaatgctaataaataattctccttatattcagaaaatggataatgtaaattaactctttgaagtttataaacttcatgatcagttctataaattttaatttgtcttctaattatatctgctgcatgaactattccatctggaataaaatcactgtttttaccttcatatacaaaatcttgaaaaaatttccattctggtgaaatctcaatataatcttcatcattaatattagtgaaccaaataggttctggttctggagttggctcaggttcttttttcactattttaggttttcactggtttttccttcttttcctcttcttgatactcttcttggtattcctcttcttgatactcttcctcttgatattcttcctcttgatattcttccttatgatcatcttcgtattcatcatcatatgatgattcactactactagatctcttaactgtacttttctttacttttggtttattcaatttcctacccttggttgatctagccagttgtttgatatattcttcatcctgtgctagtctctccactggtttaacttcacgtcttgaaccatcaaatttttttcccctgattagtaaaatataatgatgccttaagtaaacttgcaacttctccacctttataataagaatctgaatctatatcatcagcatctaaactagtaaacaattctaatgcatttttatttggagtaggtttctttctaggtaataatttaccttcttcaattaatcttttacgttcttctgcctttttctttaataatattttcttttcctcctgtaattttctcttttccaatagtttttcacgtgccttttcctttcgttttcgttttagttcctctaatttagctttctcttcaggtgatggttcatcttcatcatctttattgttgatttcatccttaatcattttttcaagtttttgttccttgtttttctgaaattttaaacttgattcacgtgtacgattaccacgacttgattcaatataccacattgaatcttcaagtaatttagctaattgattatttttattcttcactctaggttttggttttagagattgggtggcattattactttgatcttcttttttcttttcattgtttttttcactaatattttcattgtttacatgttgttctgttagtttattattatctttcacactactatttatactcacattgacattgacatttacattagcaacaccattctcccctttgatcacctccccgttcttaagcatcccattccccaacgcattatcgcttgtcattactttcagaataaatcaatgatctattcattccttcgatgtccaattcattttgaagttgacttcttcactgagaaaaagaaaaaaaaattatgtgattacgtaatgtaaagtatgatagattctttgatctgcaatcattaactgtacagtagagtgtttgtaatataggtttgcttttagggtgaaagagtttcacattctatatactggttctaagagaataataatataataattaagagagaaaaaacttaatttattgtaaggtttgaacttcaagagacatatcttcattaacaataacctcatttacttcgtttgctttagattttttaaatgcttccattggaacatacccccatttttgtaacattgcaatatcttcatcccagcctgtacacatagttgttaacattttttcacctgtgaaaattgcattaacacctgcattaaaacataataattgttcactttctttcattgtatatctaccagctgctaatctaattatactatttggcattaataatcttgcagttgaaataactcttaaaatattttctaaagttaaaacacgatctttatatttagttttcaattcttgttcaattggtgtacccttaattgcaattaatttattaattggtaaactttcaggatgtttatccattgttgataatgtatgtagaaaatcaatatgatcatcaattgtttcacccatacctaaaataccaccagtacatacattaatacctgaatctgaaacatttttaattgtctctaatctatcatcaaatgatctagttgaaataacatttgaataatgttttcttgatgtatcaatattatgattatatgcagttaatcctgaatcttttaataattgaatttgttgtttatcaatcataccaagtgtaacacaagtttccatacctaattcgttattaattttttcaaccatattagcaattttctttaatgcagatttacgacctttcatctctctccacgctgatcccatacaaaatctagttgatttattctcctttgcaacaactgcttttgcatagacagtatctaaatctaataatttagttgcttttaaacctgtatcattatgtgaagattgtgaacaatatttacaatcttctgtacatccaccagttttaattgataataatgtacataattgaatctctgatggattatggaattgtctatgttttaattgtgcataaaacattaaatcatttaatggtacgttaaaaatagcagatacttcatctcttgtccaggtgtttaatggaattttactattcaatgctttttgaagaattgagttggaagtagtagtagagatagttgcaagtgatctaataaatgatttcatagttgctcaattgaagatgaagcaaaagaaaaaaagaagtgtacaaaaagaagaaaagtttatgaaaaactaggggatagctatttataggaaaacatagcaaaaagtgaaccggaatggctaccatgctgagaaaatgtaagttggacacatcgagtgaatcatctggagtcatctggagtcatccactggaatcatttttttttcattacttaatacattttttatatagtacacagattacatatacactaaaccctacgcattaacagcatttccagtgtataatcatccaataatggtacatcatttgccttggtattaactttacctgtttctaatactcttattatagcttttaaatgtccatatccctcagttgtagatttaactagttttaaagtatcaaaaacataatcaacatgaatttgtaatttaactgctccatcctttgcaaaattgttcatcaatgcaatatttttctcaaaataagttgcaattgtattggaaagtaaatatttccattcattatatgttgatgttgataatgttttacgtaggtatgacatatcattagaaattgcctttatcattaattgtaaatcattataatccatattgttaatattaatatcattagtccaattgttattggattggaaataatctttcattgttttgtttaattgtttatcaaagtaattcatcacaagattgggtattttatttaatatatctttttcataacctttaattactgattcaaaaaatgttttttcaaatgtattttcaaaatcttcttgatcatttaaacttttccaaagatcaataaatataatatcattattccattgattcattatttcaatcatatatttacctgaacaccaaattctacaaattctctctagtgtgctaacattatcaattacaacatttttaataccttttaatgcattaaaacctttcttcaaagtatcaaaataaaaatttaataattttaattgaacttcacttaaaaattttaattgaaattttaatggtaatgattgataatttaatgttataccattaattaaatttttcaaattaattgaactctttgttggttttgttttatcaatttcaacaatttcaaaatcaattaaaaatgcatcattcatttcaataatttcattaaatctattattaacaaaagttttctcattttttaaccaaactgtccaaacatcttcattttcaagtattaattcattagttaatccaaaccattcattatcaatatctttattaggtataaatgaaaattcagttttcaaaatgaaatcaaattttttcaattcattgacgaaatgacttaacagattggtattatcaatttcaactaaatattcaagttccttaacaaattttctcttcatcattggtaaaatagatttaataaaccatgtactaaaacttccatttatagcattatatgatttacagcattgaatgaaaggaattgctaatttattggaaatagtactcaaattattatttaagtatcctatgatataattgaatgcaaattcaggtttatccagtctatttgtatcatgatcactctcaaaatggaatttgaactttttatttaattgagtgattagtgcatcaattgcccaaaaagtactaatatcattaacattagatgcaattaattgaaatttagttaataattggaactctttaatagtatctgttgatatttcaatatgtttatctaccttatcattatcccaatttttaacattagaagataatttcttatataatctacccttaatttcagatctaatagttgcaaataatttatcattcaattccctatgcagtctattaatatcaatattaatcttatgtggatcaccaattaatttaacatctttatatttaacataaaattcattaatttgatttctaaaatcagataatatactaaaaacatcatcatatgattcaatttctttatcatataactcgtccatttcataatcacaaattttatctaataatacactaaagtctttattaatattaaattcatggatcatttgtaatttttgtttaatcagcattttagtatatgttatagctggttcattcccatatttatccaataatttattgatttcagtaagtgaattttcatctacattattcaataattcacgtaactgaatgataacatcttgagccaacttacaatcatcagaattagtgctggtgatggtattgttattattgttattattagctgatttttcagtgataatagtatctactcgagacagagtatcgatagagttgaattgagagttaagaaactcagatatagtggtagaagtagacattagtagtgacttgtggaaagaagaatgagccataaagaaagggttgtcaaaattattaatttggcggttgaaaatttaaatttatatttgagctttcgttacgtgttctgtggagttcattgtagtattgggtgttctatactgtatcgtatgttatggagtatgtacagtattgtaacagtattgtacgtataatttgatatagtacagactaccatttttgaaacatactgtaattgatacagtaagtaatatgatttgactacacagaaactggaggctcagctgatattgatattagtatatcgaaagtataattataattataattataaacataatccatcactttacaattattacagtagataataatgaactgatatcatatcatatcatatcatatcatatcatatcatatcatatcatatcatatcatatcatattaatgtgatgaatatactcattcctagtacttctaacaatataactgaatacggctgttatcaaatactaaattatgaaaagaaaaacacaccactaatatctgatttcaactccctcatatactctccctaaaacattctccattactactcctatttacacacatagactactatcccataagaaacatgcagcaaagaaatgaagagaaactcataaagtcaaatgaaaaggcaaaagtcctcaatgaaaatcggattcgactcggtgacctcaattggaaatttcgccttcttccgaggtactttttccatgaccttcctcagagccttcattgatcaacattatttacttattaatacttataactaccactctttcttcctctgttttcattagaatctctttgaatttgcttcatttaagacaaccacataatgttctcacaaatctcaactagacaattctcctcttctgcaagaaatgcttacaaagttaccgttttaggtgctgctggtggtattggtcaacctttatctcttttaatgaaattaaatccaaaggttactcaattatccctttatgatttaagattaggtaagggtgttgcaactgatttatctcatattccaactaattcaactgttaccggttatggtccagaaaatgatggtttagcaactgctcttaaaggttctgatgttgtccttatcccagctggtgttccaagaaaaccaggtatgactagagatgatttattcaatactaatgcttcaattgttagagatttagctaaagcagcagcatgaaaactgtccaaatgcttctcttttaatcatttctaacccagttaactcaactgttccaattgtttctgaagttttaaaatcaaagggtgtctataatccaaagaaattattcggtgttactactttagatgttttaagatcttcaagattcttatctgaagttgttggtactaacccagcaaatgaaaccgtcactgttgttggtggtcactccggtgttactattgttccattattatctcaaactaaacacaaagatttaccaaaggaacaatatgatgctttagttcacagaattcaatttggtggtgatgaagttgttcaagctaaggatggtgcaggttctgctactttatcaatggctcaagctggtgcaagaatggcaggttccgtccttaaaggtttagcaggtgaagctgatatcactgaaccaacttttattgattctccattattcaaatctgaaggtgttgaattcttctcctcaagagttactttaggtccagaaggtgttaaggaagttcacccattaggtactttatcttctgttgaagaagaaatggttgcaactgcaaaggaaactttaaagaagaacatccaaaagggtattgatttcgttaaggcaaacccataaactagttttatatagtttatatgcacatataatattcaataatagtatatagtacttatttattcactatttatttatttatttattaaaaatgacctatttatttattattattaaaaatgacctatttatttatttatttaatttattcaatgtctttaatttaataattgctttcttataccctttccttgcacttctttcataataattttgtgccattataagatttttttcaactccaaatccttgttcaaagcaaataccaatcataaattctgcttcaactaattcacctccatccgctgccttacgaccccataaaaatgcttgttgttcatcctttttcaatataattttaccattttcatcaattgcaccactaccataccatctagctaatcctaatgatgcataagtatgaccgtcagctgctgctttactaaaccaataaatacttttcctactatcaattaaatcatgttcaccatttaaattactttctttatcagatttaaataaatatgttgggaaataaccttgtgaataataataacctaaacatgcctgtgattcattatgacctaatttggcactctctaaataatattttaatgttttcgatttattacaccaaacattattattctttaattcattaatagtttttaaggttttctcatcttgtaaatttgttaaacataaaatttgtttatcagtttgatgtaatttagctaatgtatataatgcacctcttgcatcttggaaacttctagttgatattaaaggatcaaatcccattatacttacacttcttaatgtttcatatgcttgtttatgatataatatggataatttaatatcttgtaaacatccattaacacctgcaaaatgcatcatacctaattgacacatacttgatggatcacctaaatttgcacctttctcaaaaaatataatacttttattaatatctttttcacatccaataccactttcaagacaacatgcaactctataacaaccaactggatcattttgctttgttgcacaatcataaaataatttataacctttaacttcatctctttcaattaatcctggatgaataccacctgaataaatatccccaagatataacttagctcttgtatcgttaggtgcaatttgaattaatttttcaagaactttaactgcagtattcaaaaacattaatctttgtttacgtagtttcttaaatgatatctcatttttacgtatctttccatcaattgtcatcttagatataacatcacttttacttaatgtctctaataataaaatagcccaataaaattgaatctttggtgtaaattgtttataatcatttaatgccttctctcttgttttcctaaatctattaataacattatcaatagattcatcagatttagatggtaatataggtttaataacaccattagctaatgtctcatatgatgtatttgttgaatatttaatataaccaataatttcacttttaacccttggattataaatagttgaattaattgattcatcagtaggtttcttaactaattctggtttcctctcttcttcaatttgtgtaggtattttacgttttgacattagtctctcagctttaacaattggtttatttaatgaattaacactcattgtcggtggtttaatatctaattcaaatttactgtttttatcatcattattatcatttagacctaaagcttcaagttttttactgtctttttccatacttggtgtaacatgatccatttgataacctgctttctcaaatcctgtacgataaatagattgtgaatatgtcaatgtacctgatttctctaattcttcataagatggtggaggttcatcaccattattatcaccatcttcttcatcttcttcttcctcatcatcaattctctgtttcttcatcttcaatggatttttcagtaggtattaatgaagatgcacttaatctttgcatgtcattttgattatcaataataagactattttttgaactagtgtttaatttttgtggtggtggaggaggtggtaatggtggaccagaatttaatgaactaacagatccattatttgatcgtattggttgtggtggtgtaggtactctaataggcattgatggtacttcagttttcctcctttcttcaagtttcttctcctcttcaagttgttgcattgcaagtactttctctaatttttgaattttctcttcaagtaattgaatcttatcttgtttatctgtatcaatttgacgatcataattatctatttgagtttcaatggttgattctctttgatttggaatatattgctgtggtggtacctgttgtggaccatgttgaggtgcaggtggatatccatatccttgtagaccttgtgggtaaggctgttgttggaacgattgttgttgaggaggatatggttgttgaggagggtaagattgatgttgagattgttgataatttctattatcatgatactgataattattttgtgccaatggatgattcatataatgcattggttgttgttgttgtggaggtggataattataatttggataattatttggaggaggtggaccttgattttgattattatcatgattatgattatgacttgatacacgagaatttgacttatgtttagaatttaaacctccaggttgaatgaaagttgaattatcatcaagcagattagctctcaactgtgatttcttcatggttatgtcaattgagagattgataaaagaaagtaaagaagtcttttctaatctttgtttcaagttatcgatgtattggtgaaaatcaaaaaaaagttgtatttatcagcagcacgggaaattcatgtaaaaatcgtgtgcttatgtggttgctttctatgggtttattaacaattaaaggaaggttggtatgtgctatatgggtgttgtgtgtagttagtggatgtattactcttgtttacacttgtttacagtgttttttgtaattatgcttgcttcacaaaaatttttgtaaaatctatttttagaatattgattactaaacttcatttttccaccaaaacctaaaaattatttcaaaaaaactttttaaacattataaaacctattaaatacagtaataaaaccttactactgacattatttattacataaagacagtagaaaagacaaaatagccactagaaggcggaaaacacgtgaccccaccactaccgatattaagcgacccctaaaattcatacgagaagtgcattagctcagaggtttagagcatcgtgcttatagtcgtattacaacgattatgcttatcgcataactccgttttctccaagaaacgcgatggtcgcgggttcaaaccccgcatgcactactcttttttttactttttttattatagggggggttattattttttatactagtaagtataagagccatactaaatattaactacatccataagtactaatctactaattttttgaaattcattttattcgaaaagataaactgtaattaaacattaggaaactattttatatattgatattaattatattgataataataattaaaacaactcatttaagcttcagctaattctcttaaacgtctaatagttgatctgatagttgcagctgcagcagttgaaacagtatatgcaccacctgcaacagattttttacatgatttacatgtccaaataccagtagaatctctcttgacagttttcttaccacagaatgaacaatcatatctagcatgttgttgaatttctaatttcttacattgtcttcttaatgatgaaccatatctgataccgtacttaccggtgattccgaccttcttagttctcttggacattttttccttagttgtagtggtatattaaaagacagaaagtaaaataagaaattctaattcaaaagtttatgaaaaataataagaataaaattaactatactgtaattgaagaaaaaattaaattttcaatatactcagtactagtgagagggcctagttaggaagcgctaccttctttaatttttcattttttcatttttgtgagggtttactctttttggagggcgtaaccctttcattgcgcacgtgacggtttttatttatttttgctttacctgattaaatggttgcatgaattaatgtgtatatcaattattagtgattataaactacccttgctagtggatcaacacaatgaatgctgatgatgacgacttcctatatggatcagacaacgataaagatacagagaataaacaattagaaactaataatgaaataaaggaaataccacaatcacaatctcaaactccagtaaataatataccaattgaaacaaatgtgtcagaagaaccacaattacaatcagatatacaatctgaatcatattcagactcagattcagattctgatgtggaatttataattggatcattagaaagtaaaccaatcgttaaaccaacaactacaactcaaatagttccagaaacaatacagtcaactactgaaccgacaataataaatcaacaagatcaagatcaagtacagtcagaaatacaacaacaacaacaacagcagattaaaactgtaccagtattaacaaatgatgatactaatggatttaatataaataaaattggtacatttaatgatataccaataactgaattatcaattgaagaattaaaggataaaccatggagattaccaggtagtgatttatcagattattttaattatggatttaatgaaattacttggagaatgtattgttcaaaatttgaaaaaattaatgaaaatttaaataataatatgggtatgaatattaatggtgtaatgaattttatgaatatgccaggtatgaatgtacctggtatgaatccaatgatgatgaataatcttaatcctaatgaataataataataataataataatagcaataacaataataataataatattaacaataataataataatcaagagaaaactccaatgttgagagatttacgagatcaagctgataaagatgttgaaaaaggtataccgagagacagagatagggatagagacatgagagatagagatgtaagagacagagatataagagatagagacataagagacagagatcgtgacagagatcgtgacagagatcgtgacagagatcgtgatcgtgattgggacagaggagatagagatagagatagagatagagattgggatagacttaaacaaagacgtagaagaagacgttaaatacttaaaaagaatactatatataataacttatataaaccaattataaaagttttggatcagaaccacttgcaatattacattgatgcattaatcttttatcattttcattcaattcacctgtaactgaatgtataacacctctattatggaaaatacataaatcacccttttgccaatcatgacaataaatattatttggactaattgcaggtctcatcattgaatgaactttctttcttgcatcttccatttcataaataattttaccagtattagaatcaattaattgataaacacaacatccatgaacttgtaaatgattattaccagttgttaggatttgtccaaactaatggtaattttttcaattttgattcttcccaaggtggtaattcatcaaatgatttttcctttccttcacttacaattgttaatccatcacttgttgctttacaatcattaatgaaaatatatggatgaggtgcataaacaacagttgtatttaatgcaaattgtttatcttcatcagataataaatcaaatgcaactttacctgatgcaaatgctgttgcacctttagcaacttcaatcatttcaccactatcatcatcataaataattttcatcttttcattagtttcaggtataactaaacctaaaagagttgtaacaacaggtggtgataattcatataatgcagcatctatatgccatctataaaatcttgtttgattatttgctaattcttcataagttaataattttttatggaaagttttatgaacaggatgttctaatttaaattctttcattaccttcatgacctgcttcaaatgtaccattaccaaccatcataacttcaggtcttcttgggacacatttaccatcttttgctaaaattgaatttttagaatgaaataattcttccttatgaccataattacttgcacttgatggatcaaatttaatatttaatgaatgttgtgattcaggtgttaaattttcctgatttggtataactaaaacagaatatgttaataatgcattatttaatttttggaaatcttcatcatttaattttgatggatcattagtgtaatctggtaaagtaatctttgcaccaaatttactattttctaaaggtgttactaataattctgtcattgtcattgtttgctaaaagagatagtattcaataaataaaagtaaaccatcataaactacatacttatccaccctttaaataccaatccctcatcgaagaggtaaaccgatgagagagtccggtcaccggtaaccgctttgctccccgcggcagaattaccgaaaagggaaatacattcttatcttatcttatctaatgtaaatatacgtatttaactattataattataaaactacatctttcatcgaatcatctaattttaataaccaatccttatttgaaatcttattaaaattaatgacaccattaaaataatcaacccatttattcattaattcaatattatcacaagagaattcaatattttcaccattatggaaaattattttaaatccattacttaatccatcatatggctcaattactaatttgattactttccttaaattaatctttgcctttaatttattatcaatatatgcaaataattcattattttgtaatttataatatctacgtgtaattgtattaacatcaccacctaattgattcataaaactttcaaattggaaagttttagttaatttcctaaattcaattaattgattaattgcattattaatactaattggtaatgtatcttgtttattctttgttattgaagattcaatgtaaagcatttttaaattaaggttacaaataggtattggattagaattttcaattttagatttattaattttagtatttttccattcattataacaagttaatgaaaatgttgttggatggaatgataccctatctttatattcacttaaaattaattttcaatttactaaatgaaccatcgggggagatataatcatgaagtggatcaattggttgtttctcagttactgtttcaacagttttatattgttcctaatggtttctcatttttattttattctttttctctttattgttgaattttttgaaaaatgatttagaatttgattttggtttctcttgttgttgtttaataagtactttctttgttgtaataactttttccattggtaatttatcgaattttatcttaaaagttataattaattgtaaatttgatgaaactatacattcaaattccttatcaattggtataattggattattaacatcaaagaaatctgttttaatacaatgaataccattatcaaaagtcaattgaattttggcatttcttgattccaatggtagtgatattgaattgatgttaagtaatctaatgaaaagacgtgatactatttgtggttgttgttgttgtagtggtggtgatactgattcagtaacttctgtaattagtggagcagaatcagataattgttcaataaatggattatcaggtattgtctttttaacactttcatttttgtataaatcatcactaaataaattatcattaaatttatttttaaattcaacaggtttatcgaaaacatgatttgaataatcaactggaattttagttggtgaaggttgataagtttcaaaaagagtactatccggagttggtgtatggatggatacattatcaataatatcatcagattgtatatgaatgttatcattattattattattattatcattatgatctattaatggataatctttaattggagcagcattatgaatattcattaaactattaaattgtaattctttcagttttttattcaattgcattctttccttttgttcttcaaacttaagtaacatttttctctctcgcaggtgagacatttatgtccttaatgggatttttatacctatataaaggtgtattagtattagtatcattattaatatttagattattatgatctacaatacctaaatcgacaatacttgaatcatttgaaatcatttcaccatactgttcattaaatgaagtatcagtataatttaaatctttcttcaaaggattaattaattttaattcatcatcatcatctaaatactgtttaatattatcaacatccattgtggtaacatttttaataaaattaatattttcaaaagtatttgaatgtttcattgagttatttttccaaacttttttcaaaacaaggatactatcatcaacattatccactgtactatcatcctcacttatgaaggaatcatttaagtcatgtaatagagacaattgaagcatgtttgctaagagaaagatgtgataaatagatagcaaaattgattttaatcagcaatacttccccattaggcaaaatgtcaataaaatgtcaatgaaaaacttacccgcgaatcaaaaaacaaaaaaaaaaaaaaatgacgtgagaaaaaaaccttccccttcccctgcgaccttcccacttcccttcatttcccactgcatctcttcacttcctcccaatactcccaatactccacactcccaatactccaataccctccattgtgattatagattatacccgcccccacacgattagataacataatgtcaacagatataccaactgcaaaggaagaattaattaatgctttaaaggaattaagtaaagcatcattagatgttagtaaaaagactaatacattattaagtttattagataatgataatgataatgatgatggatcaaataagaaaaaacgtcgtattaagagagatccaaatgctccaaagaaacctttaacttcttatatattattttataatcatcttagaggtgcagttgcagctaaagattcatcattatcacaaactgatattgcaaaggaaatttcaaaacaatggaaagaaatgtcagatgatgataaatcttattggagacaattatatgaagatgataaattaagatatgatactgaaatgattcaatatagaaatagtcttaaccttaatatctaatattagtagtgtctatacatcttttataaatgctttcttaacatatcatataaattattattgatattaatatttgttaaaatactttgattaaattcattatcccattcacgtattatctttaaaattgtaccttgtcttgtctttgaaatattacatttattaaacatattagttattaatatctctctattaatattaatttcaggtattatagtattatcaatacctttaacaccatttaatccaaaatcttcatattcatattcatattcatattcatattcatattcatattcactattcacctttcactatcactattcactatcaatatcactttcactatcatattcttcatcactatgctcctcagaatcttcatttttatcattaaaatcatcaatcataacattatttgatgattccagtatattcataatacataatatactctccaccacactactcctctcttccttctctaatacactcctccaataccttaacttatccattactataagaggaatggtgtatagtttacgtaatataatcatcaaatttcttcattttcctccaaaatttcaatttattggaatttttttggtatagtgtattgtattgtatattgtaacaattcttttccttaaacaaacgaccatgttcaagggattaacatcatcatcacttattcatcatcctcaactttggaaaggattaccatcaaatgttattcaacaactttatcgtgcaagagttattaaattaggtaaaaattataaaccttctaaaattgaattagattcaatactttcaactgcaaaatctccattagaggcccaaattatttataattcatatatttcaactgaagctgatgtttataaagcagatgctgatactgattatgataattatattactgaaggtgaatatatggaagatccattagaacctaatggatttgatgaatatccttcaactgctcaagatattgtacgtgattttagagatttaatggaatttaatagaaaggcagcatttgaattacctaaattatcgaaatatcgtcaaatttataataataatgaagtaactccatttaaatataaatatacaaaatatttaggtgaatcacatccagctgaatcaaaagtttcagttataattgatattaaaaaattaaatgatttaaataatgattcattacataaattaaaattaatttcaggtccacgttataatccaattaatgaaacaattacaattacttcaaatagatttttagaacctgcacaaaatgcatcatttatttcaacaattattaatgatttaataaatgaaagtaagaaagatcctcaatattttaatgatattccattagatacaagacatattaaggaaaagccaaagccaaaattccctgattcttggttaaatgaatacattccaaatcaaaaaatcgttgattaagtaaggtatttttttataatttctatatcactaaatattctgtaaataacatgcatagataatacactacattccttttagcaatgccaccaacacgacgtagaagacctggtcgtccaagacgtccatctcctccacctccattaccaccacctttattaccaccaccaatttctttacctccaataccttcaagacaaccacctgcatcattaccaccaacacctaaaattcgtcataatattaatcataataataatataataataatataataataactaccaatatcaatatcaatacgaatcataataccatacctaatgtggttaaaccaattactcctatagaacatcctaacaatacaaacactataccattaattgaaagattaacaactaatccaaaatatgttgatatacttgaattacaaattaatttaattaaaatattacttaaacaaacagataaattaactattaataattgtatcaatgatcaaccaaattttaatatggatgaattattatcacaattaaatccattaggattaattactgatgaaaatgatacaggtgttagtatgtcacctgaaaataatttaactgaatttttaccaggtaagataccattaattgatttatcagtaccaaaaccaacacaacaaatttcttggaatacatttaattcatatattgaaccatattttaaagattttaatgaagatgatattaaatttttacaaaaagatgatgaaacttttgatgatgaaaatatacagatacctccattaggtaaaaataatagtataagtaaacaaaatatagcaataggtgatgaaaattcacttataaaatcatcatgtggtccattaacatcaagaattttaagtgctataataccgaattttgataatccaattaagataagtaatgataatttaacatttaaagaattagagaatagagttcaaagagaattagaatttattggaatttttcttaatgttaaacaaactattaataataattcatgggaacaaaattggtcaagtgaattacaggatgatgaaatttcaacaaatttaaggaaattaattaagaaattaagtgatataattgatattaataaagataggaaaaatatattaataccaatagttgaaaattatttagcttatcaagaatatttgaaaatattagatgatttagataaacaaattgaaattagttatagaaggagattaaatgttaatcctaaaagacgtaaggaacataataatcataatcataatcataatcataatcataatcataatagtgatcatcatcaagagaataatttaaataattcatcattaaaggtgttgttagataaacgaaataaatggattaataagattggtatattatttaaagattattataaaatgcacaggatgcctgagagttctatatttgataaagaggaaaatacaaataaggaaagtaccaatactacgacgattaaagataacgataaagataaagataaagagaataacattagtgatgaatcatcagatgaagaataaatagttataattataattatataaaggtatgtatgtatagttaattacttaattaattaacccataattttttcaataaaccgaaaacaccatctttttcctcattttcaattttataaacaccataaccggcaacaaaagtaccaaaagttaataataacattgcagcagtatgtaaactaccataaactctttttggaatataatcaattatacaagattggaaacctgcataacaatgatataataataaacctgccatagcagaatctaatggagcagtacctgtaatgaaaggagaaataattaatggagccataccaatagtgacaaatctttcaaaagtccaatgagctgaaccatgtaatttatttgaaggtggtggtacataagcatcattaacagtaccaataatattaccaggaggttgaggaattgttttaaataaacctctcttagcaatagagatattgattgatgaagtaagtgatttagttgatctaatacctggtgcaaacattgtcagttgggaaacaaaacaaagaaacaaggtattcaagaagaacaactgtagtaatagacatgttctcattggtagaagcaagggaaatcccgagtgcggattactattttcggaattatgtatggtttattcctatataagtagtataaggtatatggtatattacagtagagtagagtagagtagagtagagtagagtagagtatagataatagctaaacactaatcttccaactacggagatcttcccttacctctgcctcagtaacgggtttctgtctaacactatgtgaatatttatcaatatatcttctaccatcattataatcataaccatattcactattattatcattataatcatccatcaccatcactattatcatcaccaccactttcatattcactatcaaattcatcatcatcactaaataatctatcatcaattctattatcaactttatcctgaattacttgtcccctctctctttcaattatatcaatataatcaactccttcatcatttttcttccatccattcccattatgttcaattatatctttaacacattctgcaggtgtaaattcttcatattcacttgattttaattgccatgtaaatctatatgttctattacttaatttatctaataaactagaatccgtaattgctaattcacatgctttattcatcatattttgtgtctctaattcactcttcatattaattatattatcattatccttatcattataattatccttatcataattaataccttcaccactctttctatttttcacttccctaattttaggttcatatccttctccatatacaccaattcttaatttaacaattgtattagttttactcttctctaataacatcttcgtatcattattattattaatatcatttaaattaatatttaaaatacctaataattcatcatgattatgttcattcctctttgtatgaaaacttatattaatccatttactatcaattgtaccatcatccttaataataactttaacatcatccttatactttacccaaaccattaccattattaaatttaactctatgatttttaacttcaacatcatttgatttaaattgattaacatttagtaatttatgattattctttaaaatatcattacttatattacaaaccatataacatttagtaccatcattcaatggtacattgaccaattcatctacatcaatatcaactctaagtccaattctcttcattacttacagatagagataaagaaacagtacagaatactggacaggaacatcaccccagaccctttaatataatatagataacatgaattttcgcttttttaaattttagcctgttattagcatgtttatttctttctaaaggtagatcaatcaatatacaataaccatgtcaaactggaagaagttgtttcaaatcgaaacatgatgatgatagtacacaatccgtggaatccgataatatcccaacatcaactccatctactccaattaataatgatccacgtaaaacattagttaatgatgatattaataatgataataataacagtaatcaaaatataaacactatttcaaataatctgcaaaatatttcattgaatcataatgatactttaatactacatgatttagataataccgatccaattattaatggtgaattacctaaaacagtcgaaaataataaaatgaaaccaggtttattaacaattaaaatttattcatcaaaagatttagaaatacctgtacctttaagaattaataaacaaattttaaataaattagcaaatttaggtcaaaatattaatgaaacttgaattattaaataaaattaatttattaaatgattcattagatgatgctgcaaatactaatttatcttattacttaccatcaactttaagaattaataattcatcaattgataataataataataataataataataaatcatcactttcctcaatagctcaatataacttagtttatgcaattattgaaattgaaaattcaagtgaaagaatttgttcaattggtaatacaatttcaaatacaaaatttaattcagttacaacttttgatataacatcaccaatgaattcaattttatcaattcaaattttcattagaataccaggttctttattagaatcaaataaacaagaagatcatttaattggttcaattatttgtaaattaaaagatttaaatgaaactaattctaattctaattatgataattcatcaccaactcgtttacttaatcataaatggattaatttgaaaaatccttatactgatgataatttaattggttcattaaatttaacattagattttaaacctttaacaaaagattcaaaacctttatcaattgatgattttgaattattaaaagttattggtaaaggatcatttggtaaagttatgcaagttaaaaagaaagatacaggtaaaatttatgcattaaaatcaattaggaaatctcatattgttaataaaatggaagttactcatacattagcagaaaaatttgtcttaagtaaagttaattcaccatttattgtaccattaaaatttgcatttcaatcaaatgaaaaattataccttattttatcatttattaatggaggtgaattattttatcatttacaaaaatcaagaaaattttcattaattagagcaaaattttatatttgtgaattattatcagcaattgaaacattacattcattaaatataatttatagagatttaaaacctgaaaatattttacttgattatcaaggtcatattgcattatgtgattttggattatgtaaaattaatatgaaattaaatgaaaagacaaatacattttgtggtacaccagaatatttagctcctgaattattattaaataaaggttatacaagagttgtagatttttggactttaggtattttattatatgaaatgttaacatcattaccaccattttatgatgaagatgtttcaattatgtataaaaaaattttaaatgatgaattattatttccaaatgatattgataatattacaaaagatttaattaaaaatttattaaatagggatccaaataaaagattaggtattaatggagttgaagaaattaaaaatcatgaatttttcaaagatattgattggattaaattaaataataaaggttatataccaccatataaaccattagttaaagattcaatggatatttcaaatataagttctgaatttactgatgaaagaccaatggattcagttgttgatgattatttaagtgaaagtgttcaaaaacaatttggtggttggacttatgttggtagttttaatccataaaagtataatatatatttaattttctatctctctatagaaaataaaattgtaaaattattataatatcttctaaaattgtaccaaatgaacctaataaccaactcatatttaacattaaataatcataatcatttctatatgaaacaatttgtaaactataagttatattacctaacattgtgaaaaggaaaaataataatgataatccctttgttgattttttttgataattatgataaatttgtggtaatctagcagttaaataaagaaatgcagaacaataacctaatatttgtggtacattatatgaattagttgaagaagttaatattgttgttgaattattaggaatttggtgataagattgaaccgaaaatacctgatgatataactaatataattggtaagatatatttaatgaaaattgaatgattttcaggttcataaacaacatcttctaaagttgaagatctacgtctttcatgatgataatgatggtggtggtgatgatgttgatgttcatgatgttgattctcaccatgttcttcatcattaactgcaccataaccttgctctattataacaattttatcaattcttttcttatcatagacaattttaatataaagataaaatgcaaaagtgaaaatatcagcaaataaaaaccaagaagcaattaatataacttcaggtaataaacctgcccatattgaaccaataaaattaagtatatcaccaattgaccaaataataaggaaaattggtgaaattccatcaactgttttcaatctccattgttcaactaattgaggtatcattaatataatccaacaagagaatgaaattgaaccaaatattgatgataatttttcacgtaatggacttggagtatattctattaatgtagttgttaacagtccctatcataagtgtctcggtatgtatacttctcttgaaagaaaagagtcattttaaagataacaaagtcttgcaatgcaaaagaaaagaagttttccaaagaattttgccgcgctgacacaaattacccttttgagaattagttagtgccttagctaagtattttttacctgacacttgtttcttctttaaactttaagcatacttatgaacaataaagacagtggtagatgacaactgtaggtgatccatgtaaatcacaggcatgtgcaattcaaaactgtttaaagagaaataattataatgaaagtaaatgtactgcattaattgatcaattatattcatgttgtcaaaatttttatcaaacaaatggtaatgatgcaagatcaccttgttgtccaatacctacattattacaatttaaaatcaaacaaagagaaatggagaaaattgatgcaaatttactaaattaaagtatagtctacgtatgaaatgtaagttagggaccgcatagtcaagacatagaaagtcaagacacgacatttaaaagccgtttcaaacttgagtgaaatccatcactacccatattgatataagactaacccacagcactatttagcaattgaagaatactaaatcgcaactctaatgggcgtctataggttaaaaaacattgttaccaaaagaaaataagttcataagataaaggtatataaaataaaagtggaaaatcacttccttttatagtgcaaaatttaattttcacctctatttgagggtttctctatatataaactattacttacttacttacttatattcatgtgtatctggtaacatatttctttacttcactttcacctggtatccataactctaccttattagatacaatatcaattttaacattttcttcgaattgtctaattgcttcatctatacttattggatcaatattattatcgtgtaattgtttccttaataatgcaatatgcatctgtaatttaccttgtaagataacattattcttaccattatcaattgcaattttatttaatttactcttatatgttgccatttgatttgcaatttctctttgtttctttctcattaatgtcattttacgttcactctcttcaaccctttcatgttgttcaagtataaggtataaaatacttgtaccaatacctaaatatgcaatacctttacaaaattctttataactatcaaaataatttatcttagtgtctttattattactatcattattatcattgttatcactattgaatattggctttggtggtattatagatgtacttggttttgtagtttcaattttggcaggtaaatttgattcattatggaaaaaagttggtggttttgaaacattgctactatcatttccaattgtagaatataatcttatacgaatctttgataattgtctaatcattacctctagaagaaacttacgatatgatgattaacactattactattactattactaaattaaccaattaaatgcgcgtattaattaataaagtatacttataccttaatttatacctttacttacttgactatcatatctatttaacaaagatgattaacttatattatattatattagtttataattatatttattatattatacataaaaaatctataacataatttaatgttttcttgattgagcaataatattactcatttcttcaacttttgcaattgctctcttttgagtacctaatctcttctttgcaaatttctttgctctcttttcaccagaatttctaattaaatcaacaactcttctttcatatggtgctaaacctgcaacttctctaattaatgatctaacaaatgtagttctgttggattttgaacctttcttatatgattgtcttggagtgacaacagcctttgcttcgactttgtgacctttgtttgaaccaagaatgataccagatgcagccattgttatatgttgttaaatgaaactaatatcaaagagacaaactactaaagttttaaaaataattaaataatcaagtaaaatgaatattcattatgaaaaattaatcattactatacacctacctactactactacaattgaaaattttcaatttcctcactcactgcggggggaatttcttttttctccctcgctctattttctttaaccgccttaagtccccagtaatggaaaataaatatgtggtgcgcgggtgacttcccaataaggaaagtaggacgcacacttttttttccttattaaattttccattctgtgactgcttagtatttttccatttatatcggctattattcctcttttagggcgtctcgcatgagttacccttttgagcagtatcgcttatatttcctattcgggaatatttaatttattttattttatttacagattatctatacaatagttacatgcatgtattgtatatttacaatttaacttctgaaagatcaacatttaatgattcacattctttaactaattcttcataacttttcttacaatgtgcaatattaaatgtagagaatgaatatccttcatggactatttaatttaacatatgggaataattttttcaaaatttctcttttacctctaattaatttaatttcttcccctttataagttccttcataataaactttatattcaccttcaaatttatatggtaatggtttatttgacatctctctagcttttaaaatatcatgtcttaatttccatccaaatatacctaattctttaattcttgcctctttctcctttgtaacataattatctaatccaccctctttagtaatagttcttaatactcttgccgttaatttcattttaatcattctatttaatgctgatgaccataaattcttactaataacatttggtaaccatgttcttcttgttctattacccatttcactaactttattaccagttgttataacttgtcctccaaataatcctctatcacttctcttaaaaatacgactttcaccatatggatatgctggatatttactaacttcctttggaacccataatctattatttctaatatctccaatttgatattcaactggtttctttaattgtctattaacaacatttctatatgcacgtgcattgttaatagctgatgtggaaaataatctcacacttcctataactctattaattgattccattgtgttataaagatactaccaagtatatatcgatcctttgatcattaacaaattcatgttggaaattgtaaaattacagaaaaatattacaaaaaatcaaaacccagcgtcgttgggtcgataaccgctgtcttacgtaatatcaccaatcaccaaaatttacctttcttctttaacccaaatacattcaatggattactcttattattctttaacaaattattctcttcttctaactcagctaatctatcctctaataccctattctcatccataacttgtaaattcacttccattgccttttgaatttctttatctaatccttcacttagttctccactagaaaaattattattatcatcattatttccactattacttgatgatgttaaattatgtaatctattcttcaattcttcaatttgttcatttaatgaattattctcttcctctaatgaactaatctctaatttacccttaaccatctcattggcaatttcaacatgttccttattcaaaattgcataaattgcttcaattttacgtatctctttaactaataatccattcttattttgtaattctttaacttgtaattccctatctttctctaatctataaatttcatcaaattctttactatatttctctaatgtaattggtaatatattaattgacattgaatcttttaaaaataaatcaatctcataatttcccaattcttcattataataaattttaaataatttatcttttaaaaattcaattaattcatcaaattttaatgtcattaatatatcattattcttaatcattaaattaattgcaaattttaaaattgaatctaatccttcagttataacaacatcataaattcttaataccatatctaacgggaatttatatgcaaataatgttaaaaaccattgaattgcatacattgatgatttaattttttgatttttcaaatgctcaaataataaaggtaatttatcctctaataatctatcaaattgatatatttttaaatgtaatcctggcatttcaggtaaatacatatccctaaatccatatgtaaacattaatttaactaataaacaaaatgcttcatcactttccatattcattaataatggtacggttataaatgccataccttgtgtatatccaacttctaaatcatataaactataaattttaattatattaaataaatcatcaattttatctcttatttgtgaatttttaataaaacttgtccttgataaatcacttttaattaatttctcaaatgaacttttattattcttattattaataaaatattcctttaacttgatattatttgaatcacttaaaatttgccaaaccatacctcgtatttcaattggtataccattagttatattttcagttaattcattctgtttatttttaacaatattattgtaattattgaaaacttctgaccaaaattcccaattgattttattgattggtattttatcttcactaccaattttaatttcattgaaagttttcttaatattatcacgtcctttctcaaattcaattcctttcttcattatccttcatttctaattcatgttcattattttgatatctattatatgccatatttaaatgtggtggtgatgaaagtatttcactagtttcaatgaatttttgagaattactttcttcaaacgaataccaggtaggtgtaacaggtgggattgtttctgtaatagtatcgtcaattggttcctctttatttagttcaggttctatcttagttgaagtttctttaagatgatgaataatcgatacttgttccgaatcaattgattccatatcattaatattaatatgttcttcttttgattgtatttcatcatcttctttgagatcttctacatcaattggttgatcattgacatttaagtctttctcatcggctattgattcttctttctctgtataatcattaacaattgattcagcgttatcttcttgttcagcaatggattcatctttaacaattgaaatcatcgttctctggttcttcattaacgattgagtcgttcttcaatttcttcttcagcattcgaattcatctttagttatttcgtcctcgttagcaattagttcttctttgataattatttcttcattattatctttatcttccaattcatcttccttcactgaacttctcagctatatcatcctttttttcatctatttcttcaactggttgaacttccccttctccttctccttccttttcttccgcctcaactgcatcaattccgattacatcactttgaatgacattactttcttttggttcataatcatttaaatcatcaatactgtcattattgctgtcaatcttactattcatagactcactcattatattccttattcctcaaacagccctagtcggaatcaatattaatgaatcacctgaatgccctctgaatctttttttgttttgctttatccatttattatttttacaagaaacattacgtaatagttttttgttggatatatgagattgtttgattaaataaaagataaaaataaagataaagataaagatttattaaaaaaataaacaccttaacatagtgtagaaaaccaagtaaaagaaaataatatgaaaagatataaaagaaaaaaaacatgaaagataatggatataaaatgcaaaaaaatcaataagattatgctctgatttcaaaataatcactagatactgaagataacactgattcacttgcacttgcatcttcactatcaatagattcaattaattgatatctatctgatgataaaactgagtttaattcagatgataatgatgcagaacttaaacttgaataagaattaacagattctaattcaggtattgaatattcagattcattatcagattctttattttctaatatttcttcatttttataaactattgcagttgtaacttcacattcttgtaataaattttccattttaataacatcacaatttggataataaaatcgcaatcgatttcgtgctttatcaaatttataacttgttgaaccaatattttccttaacttttttaatatcctttgaaactttcatttgatattctaaatttgacattataattttctctaaatcatcattacaatcatcactgaaaatacctgaatttgggaaaaaatttgatgattcaatagttttagataaattaaattcaatataacaacctaaatcataatcatcaaaacctacattagatgctaatcttaaatcattattagcaatagattcattatctctagataaataataaacatgattattaccgatatttccgtcaatagaattattactatttgttgatgtacaatctttacctaatttcccacctttaagaaagaacattcttaaactttgacttaaattttcaacaacttgatgagtcatatttggtccataagttgaaaacattctcgcattatgttttgggaaatgagagtacatagttgatccaacaacatttgaatttctaataaatgatggtcttttggtataagatgaatatttgaaaggttgagtttgataaactgcagctctcagtgttttagataatgagatactattatctaatgtacgtcttttaacagtattttgaaatgatgaagcataggtattattaaataatggatttttaacatttgctttaatatttcttgtagttgagaaatttcttgtatttgagaaatgacctgagtaagtacttgaaaatctattaccaccattattaccactttgacgtgaacgtctagcagctgcagataatggatgttcattattatttcttacagggatacgttccctctgtaaattttgctctaattgtttctcccctataagttcaccaagttcttcaagaacttccttgaactctctggcagtacgtcgtgagaccctgcacaagctcacgtagggcctgtggaatcatcgttgaaagtgtgtgtctgataaaataaacaactgaaaagagataaaattaataactcagtatagatcccatcttaataataacactccacagtggcaaaaaaaagaaattacgtcaagctgataagaggagtcatttttatggattacgtaagtatggtaatgataattaatatccgtgtttggagtatataaggtaatgattaatttgtaataaataattcttgttaaataataagtataaaatataagtgtcgaaaataatgataaataataatagtaataataataaaataatggttgctcaatttttagttaatttgaacgataagataggatcctaatgagaaaactcagtatataatgttataacttatatactcaagaaatcgatggtttaagttcatatggttcttctaaataagcaatatcttcacttgttaaattcttatagaatgtaaatgcgtcaattgcatcatcaactctttcaggtttactaaatccaacaattggtgaataacctttacttaaaacataagcagttgaaatgattgccattgatttattgtatttatttgctaattcttcaactcttttcaaaatcaattgatcaccttcacttaaaacatctaatcctaatagttttataagaggaccgtccgcttcattacgagtagtttcaccaactttaccataaggacgagttaaaatacctctagcatttggtgaccatggaataattccaacaccagttaatttacaatattccatcatttcattttcctcttctctgtaaagtaaattaaaataattttgcattgaaataaattttgtccatttattattttcagcaacattttgcatcataacaaattgatatgttttcatagttgaagctccaatatatcttgtataacctaatttaacaatatcatgtaaagcttccattgtctcttcaattggggttgttggatcaaatctatgaatttgaattacatcagcataagtacctaatctttcattacttgccttagctgcatccattatatgtttacgagataatcctcgactattaatatactcacaagcaggcatagttgcaacttttgcaggtgtaaaatcaggaatatcagtatctattgggaaaaataatttagttaaaattacaattttatctcttttgatattatattttttaataaattcagctaataaaacttcagaatatccattagaatatacatcagctgtatcaaaagttcttaatccattatcataacatttcttgagaattacgaaaactttctccttatcttcaataacccaatcagaccaagattttttaccaaaggacatacatccaacaacaatacgagagattttcaatccggttttacctagattagtatagaattcaggggaaacagcactcattgtctttgtatagtataagaaatgaaaacggaattaaaaaataattggggaattacttccgtttaaatacctttactgataataaactgagaccctgagtaatttcggatctatctttattaactccgcggtaaccatcgcgcccagtaaaaatactggggatttgaaattttcacaggtggttgaaaataaaggtacagcggatttaatgaatatataggtccgattctattatatgatctcattaatttatttaaaaaggcagtaattatacattttagatcccacgtatccttcttgtggtcatcacaatcttgtcatccatatgatcgaacattctcagcttacctgcctcaagtcttgattctgctgttgaatttcactattcattaagctgtgccttattctttaagtttgcagctaatttttgtgcatgttcaacagtttgcagcaatctcggcttccattctctcatcctcttcatcgtgatccttagttaagtactttcgatgcctcctttcactcttctgtcataatcatacttctgttgtaagtctagacttcacattatcatttcttcaactgatccattatcgctctctgtgattgatatagatcattgttcaatttatccttatttgcacgatcttcctgtctcattgctaaaaatgcttgatccttagctcttcttcctggaatttcttgtaaatggattattaaccttaatgtgaaataaactacgattagtaatgttccaattctttaacgtgatcatcaacaaatctttgttgaactttcatagtgcctaatattattctccatttcataaatcttctccctttggttacctaaaacacctagagtatttgttgccgttacattagcttgacctaaattatcgacctaatgtacgtgataaattaacagtatcttcacgaacatccttagtctgtctttgaattctatttaattcttcttcatcttcatctaattcttcatcttcaaattcatcttcatcatatggttgtgattgttgttgaactggatcatatgcatttaaatccatatcttcagtattatactcttgttcatcctgaacttcagctgatggtccataaggatcaaaatcttgttcagtttcctgtctttgtttattttcctcttgtaattgaacagcttgtaaaccattatttatactagccataccatcagttatagtattattatcaatatcctcaacattattatcatcacctgcatatgcatcatatgcattcataacctccatatggatcattattatcgcccgcatatggttcctcaccgggtgcatatggatcatatgttgatctagtctccgttctagacacaggttctggaacatttgtactcttagaagtaatttcagtatcattatatggatcgaatccatatccatttgtatttgatgtattagtactgtgaattgaaggttcataaccatatccatttgatggattagcagtggaaacagtggatgttcttccaagtgtacctgcaattgcagttgctgtcgttgtcgctgttgctgccgctgcggttgctgctgatgctgatgctgatggatggtaacttgatgttgtactaaaattatttatctttcctcttcttggtggtatatcatttgtttgtgcacgtctatttgaacgttcatatgttttagaatatgtgtttgtattattattggaatatgtattattggaatatgaattattggaatatgaattatatgaataagaattatcattagaatatccataattattggtatcactattagtactttcatttttaaaattatttgcatattcatcataaccgtaaccatgatttgattcatcttgattgatatcattttcataacttccataacctgtattcaaatttggcattattggttttaatgtattatcttgattctttgcctgttgttcactaaattttaccaaattcttgaaacttgaatttcttacgatgataattactttcatctttcataacaactccattcttctctaagagatctttactctccttatctgtcaaatctttttgtttaaaaaatttcttcagtcccatgattgaatgattaatttgattgtctacagaaaaagaaacaagataaaaatggaaaagtagaaagtaaccacttcttctccctctataaataacctctcatgataaatcctgttccgagaatgtaaaaatcaagaaaactacgtaatacaatttcagaacattaacaaatgataacacagtagatgatataaataattgtaatgaatgctacaaagatcaagggattggaaggtatgtagtaagtataatgaaaagtctatatttaatgtcgttctataaagggtataaaggataaaggatttaataataaatattttacattgaattatgacatagagtagagagaactttcaacttgctagtgatatttatcatatggtgacactttcagataccacgtatctttcttgtggtcatcacaatcttgtcatccactatgatcaatattttcaccaacttgtttcaaatcttcactttgttgttgaacttcactactcattagctttaccttattcttcaactttaaagctaatttttgtgcctgttcaacattggcagcaaactctagccttctattctctcatcctcttcgtcataatcatttgttaaatattttaaagcctcttgtactcttcgatcatgatcatatttatcttttagttctgatttaacactatcaatctctaattgatccattatcgctctctgtgactgatatagatcattagttcaatttatccttatttgcacgatcttcctgtctcattgctaaaaatgcttgatccttagctcttcttctggaatttcttgtgaatggattattaaccttaatgtgaaataaactacgattataatgttctaattcctttaacgtgatcatcaacaaatctttgttgaactttcatagtacctatattattctccatttcataaatcttctctctttggtttcctaaaacacctagagtatttgttgcagttacattagcttgacctaaattagtcaactaatgtacgtgataaattcactgtatcttcacgaagatctttagtttgtctttgtattctccttatttcttcttcatcttcatccagctcttcttcctcaaattcatcataatcataaacttgatcatatgtatttaaatcggtatcttgattttcattgccatacgatccataaggatcgaattcttgtttagtttcctgtctttgttcttgtaactgaaaagtcctgtactccagttatttctattggacataccatcagttatagtattattatcatcattaacatctccatcacccgcatatggatcaaaaccataaccatgatttgaatttttatttatatcattttcatcataatcataacttgtatttgaatttggtattattggttttaatgtattatcttgattctttgcctgttgttcactaaagttaccaaattcttgaaacttaaattttttacgatgataattactttcatctttcataacaaccccattcttctctaaaatatctttactctccctatctgtcatatctttttgtttgaaaattttattcagtcccatgattgtctatagaaaaaggaacagaattaagataaaaataaaactgcaagagggcaattcatctctctatttaaacctctcatactttgtatggcataaaaccaacaatccagcagaaaatgtgcaatgaaagaaaagaaaagaaaagaaaagaaaagaaaagaatatgataaggtgaacaaatataaatactcctcactaaactttttccattattactgtttttgctattaatatacacttttacttatattatacctactgatttgttctatttgcaactgcagcaacaatctcagctgcaatcttatcatgtgttaatgattctaatgattccttatctttattcttattatttgattttaaagttttacctgatttatcatctgatgtattattattatcattatcaaattcattaacattgattatttcatcattatcattatcattattattattattattctcattctcattctcattctcattctcattctcattctcattctcattttcactatcttcataagtaattgcatctaatcccatataaactaacattaattttttatgagcttcactatctttaatatcattatgattaccattataaccttgtaaaacttctttattttcaaaaattgatgaataatatgggaaatcaatttttttacataattcaatatttttagtaacacatctctcaattgtaaattcattactattacctaaatcatttgcaattccttttccatctattctcccaatctttacgtactgcattaacaaatttaatttccatatatcttgaccattcttcattacgtgatttatgatttcttaaatatctcatttgaattgcttgccaagtatgtctaaattctaataattgttcaattttcctccatgaatatttcatttcttctttataataaacaattgcatcatcttcaatttttgtccaattattggatttcttattaccctttgaatgtttcttattactaacattatcattaccattaccattttcttcatcggtgtcttgaattacattaaaagttctctttttttccttaactgaagtattgttatcatctactctctcttcaatgttattttcattttgaataattggattcaatttaggattaggattatcaaaattcttctttaattgaactttcttatgatacttctccacatcagtgtttaaactttgtaaaagtacattactatcaatatcctcctcctcatcatcatcatcatcatcattattgttatcaccagtatcaccattatcaactttatcaccaccattactaccttccttagctacaatttctcccatatcagcaaatgcattattacccttcatttcatcattatctacattatccagttgtaaaatactttccatatcatcattacccttactttcactatctttactcatgactactgataagaaatgcaatacaacaacaaaaacctagttgcatcatgacacctaatttgttaacaatacaataaatttataactcactgtattataaaaataaaaaatctataaaaattactgtgttaccctctcttaaacttattgtacacgacgaccgaatctactgtttgactgtccagtagttgtactactactattaccactgaatctactctggaatctactagtgtttctcttaagtaatggtggtggtgattgtgattgtgattgtgagttgatatcagtttttttaacttcaattgcaggttgtgtcattgaatgattgtaatttctgtcttggtggtggtgattgctgtatttcttgtcttctaataggtatttgatcattacgtagttctgtagttgcacgtcttattggtggaggtgatgattgtacttgtacttgtgattgtacttgtgattgtacttgtatatctgattttgattgtgattgtaggtatattacccattaagaatgaaggtaattgtttaccctgttgtttataaaacttaattaatgcacgattaacaactgtatcatcctctgtattaccatcttgttcaatttcagttttattcttatatttcctaaaatgatgaactttttctgtattaccattattactactgccaccatctaaacttgttctaaaccttctagttcttgaagttgatggtgattgtgattgtgattgtgatgaatgatcagatgatatctcactacgtatctctgatgctatgtttcttatacccttgaacatttgtcttacctaaaagaagagatgacttgttctgataatagatattattaatgaaatttctttattatctataccctcacttaagagattattactgtaaatattatttatcaatcaatatacgatataatacgtcgtaacgctcgagaacgtgaatttctaaattttttcttatttgttagagctccacacagactcatgttagacatgtagatagagaattgtctgaatcaaacatctgtgttgttagtttgtaaaaatattgaaaattgattgagttatgaacgttcaaagtttacaccatacaaaatttcaatcaatttccgtgggagatctacaatacttgggtacttctaaataatatcattggaaagagggaagtctctatatatagaaaagatactcgatatgttttaaaagtgttgtttaacatcatttattaacattaataattttgaccatttttcgtgtttttttgaacaatttttcagtaaatttactatgggaagtaaaaattctttttacatttatttaataactagatcgaaatcaaaaaatcggcttgcgggaagttttagtttaaatttttctctttctaatgaatctattagtatctcatcaatgttactgatggtttcaaactagttgtaaatagattaaaatagaatatacactgtaggcttacctaataatcatacaaatcttacgtaatccacgtattatacttaggaaaaattatttcccccatagggggtaatattttcgtattacaatacgcttactttaatatacgatatgatacgaagattataaagttttttcagttaagtaaatatcataatcatcctttaatgttttcataattggatcattaatttcaggtgtcattggagcatataaacctggttttgcgaatgcaccttgatgttttaaaacttcaataactgcaactgcacatggaacaccaactaattttgccattgatgaataaccacctggaacaccataatcaactaaagttgaagttctagtttcagtttcaccatttgcccattcgataccaaatttatgttgtaaaataactaaatctctttcaccttcttcatattgcattaatttttctaaagttgcacataaagtatctaatggattattctttggattaattaaatttgatgaaaacatacctaaccatttcataccagctaaaattctttctctatcagattcatctttaaatttagttaattcatcaattttagaaattatatcaatttcagatgatgattttgcaccaatatatttagaaactgcttcattccatggaattggtgatgaaaaaatttcatttgtatcttcctttaagaaacccatatcaactaaaactttaacaaattctgggaaaccttgaaatcttaaagtacctctaataacagtatcagcttcaggaatattatataattctttataagtagttagaatctctatttggataacaaactaatgcataaccaggataaataaaataaggttttgcacttgacattaaatcttctgatgagattgaaacttctttaccatctttaaaatatttagcagaatttcttaatgctaaaagaacacctcttgaagaccaagaaaatttataacctaaaggattatctgaatcttctggagctggtaaaccaccacaataagaaaggaatgatttaattttaccaccagctttatgaacttcatcaattgttttaacagcataaagatgatcaataccaggatctaaaccaatttcattcataacaactataccagctttttgaatttctggttctaaagattttaaagttggattaatataagaagttgtaacaacatcagttttaccagaagcaattgcagctttaacaacatttgcatgataaatataaggaattaaagaaataactaaatcataatttttaacaattgaatttaattcatcttgattagttgcatcaacagtaattgattttgcagttgaaccttcagctaatttttcagcagaagttaaagttctacaaccaacagtaacttgaatatcatcttgttttgataaaatatcaacagttggctttgcaacgaaacctgaacctaataataaaacttgtttaaccattgtatatttattgggtggtgaaaggagggaaggaaaagagaataagaaaataaaatgaaaaatataaaaaacagataaagaagagaagttgatccaatcaattaaaaaatggacatcaatattatcgtaaattatcaaaatgagtcaatgaaaaattaccaaatttacaataatccatagagaggcggctaaaatatagtagttactcttttaggatcaaatgtcccaattaataaaggtaatcatagccgagaccgtcgcgtctattataaatattgtattacgtaataaaatacttttttttgacttcttcttcttcttcattaatttatttaccgctaagcttttatcggagtaattgaaaaataaaataaaaaatttcacaataaatgactaatttgaaaaaattattctattctgtacggtttactggaattttatttattttccgattttattatttaaaccttaatctatcccttcaatttgttctattttattttatttctgctcttatttctttcatttcttttaccagacaagtcttatctatctatctctataacacacacatacatacatacacataatgttcactccaaaggcagaaactcaaaacagtacagaatctgaagctcaaaaggctagattaaattacggtgcagaaaaggaaaagcaaattatgaatcaaattagatcaaatgcaatgcaaagacaaaattcatcttcattctttcaatcaaatttaggtggtggattctttgatatttcattcaataaaaagaattaagctatttttcttgtttatcctctctgttaacttttctacaataatttgctttttaataatgtcccccttttaatataatattacaatatctatttttatattcatatttatatttctatttatatttatatttatatcatcacatacttaatacttgatataatcaacttattccatgtagtattccagtaaattacctaccacaccccctctttttgacacaatagaaaaattaaaaaaaaaaaaaaaaaaaaaaagttttttccgccatataattagtgagtgaaaaatttatagtttttccattgggtgctattaaaatatatatatatatatatatcttaatactaggcttatatgaacagtggcttttataatacatacatgtggtgtataattattaataataatagaatagagaagttaataaacttaatgagtcatgtactatactatatataatactaagatcatatgatctatgtattgcttattaaacaccaaagtattagcaaattaataaagcaataaaatagtaaacgcggactccgctcattctatttcggagtaagtcattccttaataaaatccattaattaatttcatctctatttaaactacaacttatcccctcatctcgtgtctgtatattaaaacaaaataactaactacttactctccttaaagcaaaacaaacaactattagctatgttcactccaaaggcagagactcaaaatactacatgaatctgaagctcaaaaggctagattaaattactggtgcagaaaaggaaaagcaaattatgaatcaaattagatcaaatgcattacaaagacaaaattcatcttcatttttccaatcaactttaggtggtggatttttcgatctctcttttaataaaaagaattaagttaatgtatttgctatctgttcatctttactaatttcattcattcattcacacacacacacatctactctcactctctctctcttttacaatattctttataataattcaatagtataatacacttaaacactcgctttcttaataaattattaaacaatacaccccctctttataacaatagaaaacagttaatccgttcgattgttctaatttaaatttattacgtaatcctatctttgttttaaatatagaatgccatcatgcaatttgataaacttatcgatgccctttatatcatttcaattagctggagttgatgattctaacttgatgacatatatcattagacactgaaacattgtcaattggtttctttatattatcaaaaggtaatttgaaaattgaagtagaagtatttatgataagttcatgccaaactagaatcatctcccccacaaaaaatacggtattctagtgtgcaatttcaattgttgcttattagaacatatatggattggaaatgttacaaattattgctataaaattatatattttgtatgactctctcttttttaaaatttgttttgggtttttatgagaatgtttagatgatttttattttaaatttaattctttaatttgttgctttaaagcaagaatcttagatcaaaaatatcatttaaagaaaaagttttataaattcatttgaagaattggtgtctttggagtcacaagatttcaaatgtcattaccttaaacttaacaatgaatgctgatggatgtaacttgaaacaaaaaaaacatatagaggtatctttccagttaaattatagtgtaaatatataaaatgctctcaaacaaaacagagtacccaaacgtcatgaaatatgacatcaatttcaaaataacatccaccactaacatcctacacgaaaaatcaatcaatcactttttgaaccaaatctttgaagaattaaacaaagataaagaactctcggaaattgcctcaaactgtgaaacttcctttgaagacatcaaaaccaactttggagagatcatacacatctcaaaaccacctaaaagacctataaatatagcaagatagctataaagaaattttcacccatgcaatgaaacttatatttgaaagatttcgattatcataaacttttaccattttatgcaaacaatgtaatttaatcttttataattaaataagtacaactagaaacctgtatataaaaatgtataaatttaacagatttccaatctttattaaccaaaaaagtgacaaaaatgaatttagctgcctcatttaactatgatattttcactattacaaatgaccctttttttgcatttattgcttactatgttccagataaatcaaaattctgtttcatatacaaatctgcgacataactggcttcaaatgcaaaaagaaaggtcatcttatgtatgttaactgtttttgaattaatgaagattcaatcaattatgagaatccatttagaaattgccgtgatgattttcttattgattgtggtacaactattcatatagttaatgatattggttggttagtggatgtcaaaaaattgtgagattgttctatactattgatggtagaagaaaataccacactatgagtgatgttcatttagaaaattgtatcattttaaagaatgcaattttaattccaagagctgtgttgttatcaccacctgaattagtattgttattatcatcacctaaatgagatgaatcatttgtaatattgttattagataagttttgaatttcggagagaaaatcattgttgataatgttattgtaagaattatcaaaatgatcagaataatttcaaaatgttatacctcatcaataccaagaggcatacaaatttgaagtatccccgttaaaagctattatttttcaaaaaattctttgtttcatattcgcttatctttcctattagagttaaatgacaattgatgaatgttataggccttttgatacataagctctattctattgcttgtttcatgtagtagtggtatctattgtggttgaaacttataagaaagagggtttatatattgtttttataagagttttgtgaaaggaaaacatatttgtattgtctaaaaatatgaattgtttaaaaaaactaagtaaaaatagcttttataagaatcattggaaataattgtaaaatgtaagaatagacgtaatcttttgagtatacgtttctctgttataagaacataacaattattatagagaattacatattatttgtcctataatataatgtttgctaccatttactttaagattacactttaacacattacgtaatattttctacgtaagattattcattgattttgacaaaacttgatgatccaatctttatgaaggctcttcttttggataaatcaacaattaacaactaacgcaatgttgtacgttgaggatattatgctcaaacctgaggatattacgctcaaacctgaggatattacatttttaaaacatgatactgatagatgggttcaaagtgcaattcaatcaaatgatttccatccattctctgaaggtgataaaattaatgattggattgaaaatatgaaaaaattatttattgaatcatctaaaaatactccattttcgttaattggttatgaattttcagaattatcaaaatttgaacaattagataaagatagaggtatggaattttcagattgcgtattgttatccaaataagcaaacaacttttgcaaaatatagtagagatgatgaaaattttataattcatatattatcagctattgatcgtattttaaaatattatggagttgatataattattaaacaaatttatccatttgttaaagatacttattggggtcaaaaggttattgatttggttaaatttataggtaaagacagtaaacctgaaaggattcattcaattcatatttggtatattattaaacgttataatgaaaataatactactgatggtatagcaactaagttatttaatcttgatagaattttcgcaggtgaaattgttttaggtgctcatcaaaaaaccgtatatcccagtataagttcaattgcatattttagatcaattgttaaacatgtcaaggaagaattaagtcaatataaagatagtgaaggtatttttacaacgtattcaatacttcatatattaaaattaacaagtaaacaatatattccagaaaaggagaaactcattgttgaatattcaactaaggaagcaaataatgcaattagtgagagaagagaatttaatattaataatgttttagatgatttcaaattagtatcaaaagatgatatgaatgattcaataacacttattcctggtaaatcatttcttgaaccaatggaggttacaactaagagaaaaaacactgaacaaaatcaacaacaacaaccagataaaagacaaaaacagatgaatcatgaaggtagttttgatgtaagagttgcccaattaattgatgactttaattttaatgaaagaggtcatggtcctattcgtattccagatcgttttagaatgagaggtaatggaactatttggtgtgatttttgtggaggtcctcatgtacctggtgatcataaattcaatgatgatggtgagccaatttattcagcatttaatttaaaaactgctaagttatattttgatattgaaggaggtagatttgattaatatattattttcattcatcatagtcaattgtcatctcacttgatatatcagaatagttatcatcatcatcatcatcatcatcatcatcatcatcatcatcatcattatcatcatcatcattaattgaacgatcagaaactgttaattcatcctctgataaatactctgttgcatcagaggaattatctttttcattattttctttttctatttgcttatctttttcaatatttgtatcaatttcaatatcagtctcagttatatcttcaaattcatcattatcataaataccagattttctaattacaataaatggtgaatctattataccgttatattgccaattttttttattgaaaaaagctgtaaatataaaattcagagtatgtgcaatatcttgagataatttaagatcaattttcaaaaattcaaatgattttgaagttatttgttccttacctaaattttcaatattttttgtataatttgctttcaacatttttatgagttcactattaaatgataatctctcatttgtaagctgttctttttcagaatgagcaaagcattcgtcataatatatattgaaactgaaaatagaatcaatggcaaattgttttagtttagtcacacttatacgttgatcattctcattgtgatataatttagtaactttataaaaaatattttgtaattttttaattgtaaaagaattaccagaagttacatcagtttcaagtaataaaggcaatctatcgagtaaaaagtttatgaatttaagtggatcattagtatctttcattcgtttgtcttatgataaaaacggtagtttatcaagataaagttttcatgtacatgcatcaataataagaaaaaaagcctcgctttagattgttcaagtaagaaaaattgggtctttcttaatttccacttctttcatcatgttgtttctttatagagtgtttcaaaaggtttcctttggaggccatactatactaataaatgatttaaattagaataatcaataatcttgtgttctatacagttcatatttaaattatttaaaggtttagataaatcatcaatctgttttagttaagtatttttattagcattattgccatggttgtttgagttaccaggagtaggtttcttcctattccttttattactagaaccaaaatttctttttgctctgtaccacctgtcaaattcaccaatagcatcagcatattttttaatgaattgagcatttgcagcaccatcacgagtaaaagggtgttcgtttggtaaatgaaagaatgagcacttagcacaccaaatatgtccatcttgtggaacaaagcttctaggtgcaatactattgatgtttttctaaagaaattaatctagttccagtatgtgaaactaaaacagcagggttgtatttataggcagctgcagcttctaatttatgaatttcttcaccaaatgctgttaaatcttcaattttaaagattttttcaccgtccataaacttatttaaggtatttctaagtattctgcagaattcactggtatgtttcccatcaagaacaccaataagaactttactgactaatattaagccacaagcatctaaatccttttcattaagttctctgaatctcttgatgaaattgtgtaaatacaaacctaaagtaccagaatattcaatattacctaagttgctgatgttgaggatttccaaagctttcttaccattaagtagttcttcaatttccacaattcttgagtgtgtaagaccattactaccatttctggatttctcataacaacaataaatcattatagcgggattaacattatctttgacaatctctttcacgttcaagatttttgccaatgtttcacgaatctctttcttgattctcaaaacattgaagattctacatacttcatggaggccaaaatatttgattgattcatgtggaaaacattcaggatcatacttaaatgtcttcaagttaaaggaatatttggtaaagtctttaggggatccttagtaatattactatcaatatttttttgtacaatttattatataaacttgtttagtaaataaattgttaaataaatcaaataagtattcttcagccttataaatttaatcaaattattaataaattatgtcctttgtcaaatgtaagatcaaattagtataacattccaattgataaccaatcaataattttgaaatcaattttactgaaaaaaaattgaaatttatttctcaaaaagaaaaaagtgatacattgtataacaaaaagaaagtaattatattatatacaattgacatgcataaacacaaagtaatagaaaaatattttaaaaaaagataaacttttcaaattttgaataagattaaattatcataaaaaataaatcgaccagagtgaggattgaactcacgatcttgcgattaacagtcgcacgccttaaccaacttggccatccagtcttatgtgttgtgtttaaaattacactaattctcgtaatcaccttttcacgtgacccgggcaaattttaaattaaaaacaacgtcaaatcttaattaaacatcaattacaagcataataaaatataaacaatatctccctttgttcaaattataaaattttcaaacttttctccacttttcttaaatttagtttttttaaaattttctaattaattatttactacacaaataattacacatattacttaaataatatcatcaaattcatcattatttataaatccattttcaccagacatattagcaggaggttctatattattaataaattccaatccaatataaacaattccaactaataaaataaataatgcaattataaatctaataaaactaccatgtaaatttaaaattgcaattataatataaatactaccacgaccaaggaatgaaaaaaatgatgaaaaataagtaaataattttggtggaattttaaattctaaataaatgataagaaatcctactaaaataattaaaataccttgaaagaaataatcaaatttagtgaaaatttcagaaagtccacatagtattgataaggtggctatgataaaattaattatcttaaagataattgtgtattttggtggttcactgaggttaattgagtccattgtttagtgatatgaaggaagaagttggtgagaggaagggaaagtcattaatttttgggtactataatataattttaatttattgtgtattttctcactcactatttcgtttttaatacaatacaatatttaatataattatataatataaaaaatacacagtatagcagtatataatatattaaaaaggggatttaaagggttggtaagtagtttaaaaaggaataaagaaaatatttaaaaataatacttaattaattaatgtaatttacttttaatattaaaattattataattaattaaaaagaattaatttttttcttcagtttgttgttgttgatttgatgattcatcttgacctgcttcagacatatcagaagtccataaagttaaattatctcttaataattgcataattaaagttgaatctttataagattcttctgataaagtatctaattctgcaattgcatcatcaaatgcttgttttgctaaatgacaagctttatcaggtgaatttaaaatttcataatagaagacagagaaatttaatgctaaacctaatctaattggatgagttggaggtaattcagtaactgcaacttcagaagctgatttataagcttctaatgaagcatcagctgcatcttttctcttttcagaaatagcaaattctgctaaatatctatgataatcacctttcattttataatagaaaacttttgattcaccagattgagcagttggaattaaatgattattaagaacatttaaaatatcatcacaaatatttgttaattctaattcaattttacttctataatcccttataagtttaacttgagattcattacctttttgttcttccttttgttcaattgaagatacaattctccatgaagctcttcttgcaccaataacatttttataagcaactgataataaatttctttcttcaattgataattcatcacctgatgatgcaacatttttcatattttcaaccatttcttcatatctttcagcttgttcagctaatttagctaaataaacagaatcttcacgtgttaatgacattgttgttttgttttatttaatttagttttttattgctatattaaaagaggggatgagtatttaatgttagtattttgtattctgtattggggatgattgattcaatgttaaaatggaaaatttcgcgatatttaattaatttagtatggggagggaggtattgatgaatgaatggatgaatgggaatatttcaagggtggcaaatcaattaaatgatattataatgtatgatttatatcattatatcattttatcatcatatcattgatgtatgtatgtaagtatatagaatagatattgtgtaaattaattaattgaattactcatattgtaaataatccctggttaataatgaaatttttttttccctcaaacgggggaggaatatccttatattacgaaacaatataatgatatgtattattattatgattaattgattgatatttatgagtaactaagtatgtatagatggtaatgatcatcaatgcagtaaataatgtaatgatatattatcttgataaataacttataatataactaatgaataaaacacacacaaactgagcccccctattggatattgaaataattaaattatactaaatggaaattaacataagtacaaacttgaatgaaatgatgaagtgtatagaatacatacgatattaattgacaaatagcctgatcaaagaaaagtaaacgaaagagaaagagaaataatacagtaaaatgaatacagaatcagtaacaatattataaacataaacagaagagagaccatacacagtataattaatacaattcgcactctcactgtccagcaattttaattttaaattctattattattattattattattatcattctattattattgttattaagtattatagacttattttttgtattatatggtgcacgggttaatgattatagtcgcgtctgtgttatgtaataattgattatgtaatattattttattttattttattttatttatgcttatgtaatcatatactataactataactataatacaccacattcaacaactttaataccaaaacgttcatcttctcttaatgctgataattgtttaataatattagatacatcttcatttaattcatattcagaatgtacataacttaccccaaattctttacctccacttaatctaatacatccattatcttcacttaatgcaattgtactcatttctctaataacattaatatctaaacttttcttcattaatgtcttcatttttaaacttgtaacacctaattttggtaatggtaattctaatcctggtaatgatgctttacttgcatcatatccattaatacctgttgatgtacatgttttcaaaatttctcttaatggaataaattttgtacttaaaattgccttattaacaaataattgtttattaatacattctccaacaccaaatttaaatgttttaacatctttttcaatattgctcaattcagtatttaaatcttctcccttaattgggaaattttctgaaacatatgataatttaaatggataaactgattgctttttatcaactaatgataataatttcctactatttcttaattttaattgttcactaattgaaacatctctaataaatatacttggctttaattctgaattgaggacatttaatgtaacaatacctaattcttctttattaattggactcatcttaatatcaatactataaacttcacctgttttaacaataaattcatcacttggaattgtattatcaatatcattctcctttaatttcttacgtccattaattgaatcaataatagttaattcagtagaaccattaccgcttgaagctttctttattaattcatcttcttgatcttgttctgaccaaacaacacctttaaaatctctttctgcaacaacaccttctgcttgtccagctaaaaatctccttatccttctaacttttgatgttggtacaacaatacaattatatgattttgcaattgaattaacaagttttctaatcattgaacctgtaactactttattaccattttcaattaattcatttggaattttttcaggtgttaatgaacatgctaataatgtaataactgcttcagttgctaaatatgatgcaataattgcatctgatgattcacctaataatggacctggtgaaccatttgaaatatttggataaattacaattgtatgagctaaatttgatgtataaccatcaatatgacaacctaaattaattgtaacaatatctccaacttgtaaataagaattattaatatcatttaattcaggtgaataaccacttaaaatattattaatatctaatgtaactggttgtgcaatacctttctcttcaatttttttaaaattttgattaattaatgtttgcatatatgaatcacctaataaacataattctgctggtgaatatttttcatgtttattaagatgatatgaatcattaattaatgaaataatatattttaaacaagtttgagtaatttgacctgcatatgaatatttatcaataacatcccttgaaagaacattcttttgcttaagcaataaatcagtatcctttggtgagatttgtaatgccattgttgattattatatacaagatctaaaagataattaaaactacaagaaacaaataaatattagaaaatttttctaataaaaataaatcaaagtgaaaaaacttcttgcaaaaaaaatatttttttcaaaaaagcaaaattgcctatttgagacatagtaaccgtcgccgtcttatttaactttaccttacaactgctccaatatacccttcatcaccaactccagcaacacattctccattagcaagtaaacaatctttccaaacaacttgccatttatcattcaactttaattcctcagaaacactctcaaaaaccttactcttaattcttttcttaacttctactttatcaactccatcaaattctaatactgatccaatttccatatcctttctggtggtatcacaggataaaccttcccttcaccaccatctgcacataataacattgcctcagatttaatacctctcatttttgaaggttttaaattattaacaacaattactctacgattggataattcctcaattggaaactaatccaactaatcctgaacaaacttgtttaatttcttcaccttgtaaacgaatttgtgaaacatataatgaatctgcattttcatgtctctttatgtctgtaattaatccaatacgtaaatctaagatattaggattgatggatatcgtactttgatatctaatacctattctaatactgtttcttatactatttctaatcattactgaaaagagagagatgtaatgtaaagagatatcaggtgtcgctataggtagcattgatcttcatgataattttatttttgaattcctttacttatataaatacatgcactatatactttaaatcaattagtcaatatctaattggaacttatttacaatttcttgttgaatttcaaccctttccttaatattttgtaaaaattttaaattactcttaactaaattaactttattaattaatttcatctttaaattactttcacgttcaattaatccattaataccaactgaaacatcctttgctggataatttaatactttacgtacttctttacttatacgtaaactattaagatgaatataatcatccctttcaagattggatttaatcttttttattatattcttatgtacatttttcggtgattcttttataaaataatatattggatatccaatcataaatccaactgctgtaaatgtaactatcttaggtagtttgattatagatttaactcctgtaaatattgaaataacttttggtatatataatataaatgcacttgatataccagttttgaaaatatttgatgaaattattgaacttatacttaattcttcattatttaattttgaaatctttttcaggttactaaaactacctaaattgaaaatattttgaatactttggaaaaaatttaaaattgaatcaaaatcaattaaatcaattatttcaaaattaatattaatttgatttttcaattctttatcctttttatgtgaatacattgattcaggtttaaatttatgttcaattaaattatcttcacctaataaatttttacctaattgtctaatatttgtaattccatgtaatgtctttaatctaccataatcttctgaatcttcaatacttgataaaatatcatgaacaacttttaatttagtattttgaataaattgatcaatattgaaaattgtaacatttttatcaattttatcaattttactgaatttatcaatcttgtcattaatattcttacgtgtattctcatatacatcatcagaatattcatcaattatattcattactttatcattaattttaatagattgtttgataatttcatcatattttggtttaatttcatttaattctttattaatttcttccttatttgaattatattctttaatattcatatcaattaaaacaataatttcttgaaatatttttttaagatatttttgtgctggtaataatttagatattgatcttttatcaacaataaaatttcttaatgatgcctctaatctatcaaaatttggatcattattattattattattatcattatcattatttggatcattaccgggatcatcacttccattaggtttattattatcaataccattggatgtaacaaaatgaacaaaatcatcagaatctttatgagtttctggtgataaatcaccaacttgttgcataattttttcaatacatttatcctttctcttaattgaatcgaatttattaacaactataaaagttaactttttatcattatgaacatttgaaataaattctctacctgataatgtaaaatgattttctgcattaacaacaaatataactaaatcaatttcttcctttcttgaaaataattgcattgtttgataagaatctaaatttaatcctggtgcatcaattaatctaatgtcaattataccatttttcaataaactttcacttgttggtctattatcattaacataaattttcaataatgaatatttatcattttcataaactaaatcctctaattgattaatattgaaaatattataagttgtttgatttcttttattatattcacaaccaattggaattgcatgaacttcttcaattaaattattttctttataattaataatttcacagaaaacattagtacaaggttgttgatcaacaggtaataaatttcttcttaataatttattacaaaaacttgatttaccagaatttaaatcaccagtaattaaaacttttgatgaaatatcttcaactctttcctttaaattatataaatgatttaaaatttgttcaaatttagcattaagaatcattgaaatcgttgaatcatctaaattattaataaattcatcattattattctttaatccaatattaacatctaatttaagtatatcaaataaattttcaatgttacttacattattattatcagctgaacttcttctctctaatctaagagcattcttagatgttatattattcaatttagaatcataaccattatcaatcatttgttcaataggataatgaattggtgaattgatattattctctttaaattctttaaataattcaattgtattattaatactcctatctaataaaattttatttttattatattttaattgtttaacatgaacttgatccatatcaacaccattatttaaatgaattctatgtctttcaccaccatcatctccatcatttaatgtactaccttctaaatcatctaatctatttgatcccattacgtaatttgccatagatggtaaagatggcgttattttataattatcattatcattatcattattattaggatcttcttgatataaagttttatcatcatcttgatcatcaaacgaaggtctatcaccttccccattcattcccgagtgattcatcgttgataagcgaatagtttacagaaagaaagacagaggaaacaataatcattaaaataaagcaaagtaaaataaaaaaatcagtgatctctccactgtctcttagtaaatggaaaaaattattaaaaaaatttcaaccgttactagttgtattattataaagaaggatcttgttttacagacaatgtcgtttaggagaagaggagagatagtgtctgggagggagagaactcctggagtgcctgtccccaatgttgccaatccaatgcttaatagaagtgcagttaatagatctgttagaggtcctcctgtttctgtaggtagtaaaccaccagtaactaagaatacggaggtgaaggaagaattttcacatcctggtgttaaaccatcaatagtactctcacatttaccatgtatgtcaacaggtacaaaggatattgatacaattttagttcatggtggtattccaatggataatatgatattaattgaggaagatggtagtacagattttagtggagttttagttaaaaattttgtaagtgaaggtataatacagaatagacttgttggtaatggtaaaatattaaatcattgtattgttattggtatggattcaatttatggtaatgaattatataatatttatgctggtaatagtaaagaacgtaaaaaaaaattagttaaagaacaagaaggtaaattaagtgttagtaatattaatgcaaataatgaattaaaaattgcttggaggtataagaaagaattacaaaataataatttaaaggaaattgataatgataatagtaaatatcctgattattgtcatcaatttgatataacgacaaatatacgtccaagtcctggatctcctgaaattagttatatttcacttgaatgatggttatgataatatattgaaacaagttaataaaatagttgaaaatcaattgaaaaattctaaagataataataaattaataagaattgcaataccttatttacttaatccaatgatttatggttgttcagatgaattaattaatttaagtaatgttttcagatttttatttggcttaaagaaaattatgaatacttattcaggtcgtataacaatgatgagtagtattagtagtgaattatatgatgatagtaatggattattagatatattggaaagtatgttatttgatggtgttttaagattagttccattcccacatgaattaaatgtattaatggaaaaagtttataaaactcaaagggaaaagataaagcaaggttatgttgatattttacgtttaccagttttaacaagtatgggtatgatggataaaagattaaaggaatattgttttaaaaatagtaaatctaatttccatgttgaacaatggagtatacctgttgaggaagaaggaaattgttgaaaaaactgacttttaatttatataagttttgtaactatctaaccaataaagattttccataaataatctaataagataccaatccagaaaacatgaccagtattaatattttccttaaaccaataccaacaatttgcaggattatctaaatcgactttcttagtcatattaaataatctataaccaccagctaatgcagctaaataaaagaatggacccataccagctaaaaatcctgaagttaaataacatgtcatttgagctgtacttaaagcattgaaaattttctttgatgatgtcccccatttaagtgcagttgatttaatacctgccttaatatcaaattttttatcttgatgtgcataaattgtatcataatgcatacaccagaaaaatcctgataaataaagtggaatcataacaggccaattccaaactcccattgcaggaaatcctaataatgcaccccaattaaaacatgcacttaaaacaatttgtggataatatgtaactctcttaaagaatgggtaagtaccaactaataataatgatgaagcaccaagaataaaacaatctaatggtaattgtaaaagaataaataatccaactgccatttgacctgataaaaaccaccatgcttgattcattgaaactctacctgaagtaattggtctttcgaattgttcttgcaactttattatctaaattacgatcccacatatcattaattgtacaacctgcacctctcataacaaatgcaccaactgagaaaactgataacatccaaatagttgataataatggtgctgatgtcatatatgctgccattgtaattgaccacatacatggtgataataataataatgtaccaataggtttctcaatacgcataagttccatatatggaatccatttatctgggaatttagttaatatacctaaaccttttaatctttgtatacgtgcctcctctaattcttcagcactgaatggtgactacagttgttgatgttgttgttgattgtataacattgttagatgtttgtttagtagtatttaaatttctaatttgaaattgaaattgaaattgttggacccttgaagtgaggctgtatgatgaatatgatgggagagttttcaatgatctcttcaatgaagatattggggtatgaaatgaacgtaatggtgacttcagtaaagtcaatgaagaccatctggatggtgcaaacatggtcaattgcctggggtataagagtatgtgtactatatgatataactagtaattggcgctttattattcgttgaatgaaaattatgaacttttaacgctatatagaagaactttaaacttttcagcaaggtaccacccttggttttgggaagagacatggtttatttacaattacaagacttttatcattatctttaatgtccactccgtacatactctctgcaacatctttaccttcattgtcgaatactgcaaacctcccctctttgaatgattcgcatttcattgctgtttctaaacttacccatttgggtgtctccatcttggtgaaattacgtatctctccaccgtatttacccttataaaccattttcgaacaatcaggtatgaaaaatcctaggataataataacttttattaagtatttgggtcattacaatttctcttaatgcacttattgttccaagacctaaatttgcatgttttggatcccatatgaaataaacagatgatataccatcaggtagtatatctaatactgatattgctgcaagttctccatttataatataacattcatgaatgggaccacgtaatttctttaaattttcaaatttatcatcatctttgtaattatcaagtgaaatagatgaccattctctattgatagataaccaatcaattggtccaacatcctctttaaatggatcatcacataaaaatctccaaaatccttcctcattgacatcatcctctttatcattatgtacatgaatttgatatttcttatataactcatactttatccattgagaaagtatttggcaataataccgtatagaaatcatcgccacgatctctagttaaatatgtctctaataatgatttaccattaccacatgatggattattaaacttattgtagaatttacgtaacgttttacgtgtattatgtgtaaaatgatccattattaacaaacatatcgtaattagttctaatagtgtattgacgacaacaagatcttaaaagatctggtttgtacatatatgtaccacttctcctccagccattcctttatttgatcttcatattctttcaatgtcatttcatcaacaataccattacttaatgaacaattgttactatacccttttccttccattttctttgaaattgattccaatgcccatgattgagcttccctctttttaccatggcaatatccacaatttgtactctttacgtagtccattggggagtatagatagattctgataaagaaataagtgaaataaggaagatcaaattgtgccgtatatagtaggaaattagtgaaatttaaacaatttcgtttactatatatatgtgcagtctttctttgttctttatttaaaacaacaatgacaactgtccatcgtaatagtatatctaagagatcttctgctcaagaagtagatcataaacgtcattcaaaggaaccttcaattgcatccacaatgtcacgtttacaattgttaaatcggaaattcaacaattcaccatcatttgatattgaattaggtgaagaagatgaagaagaaggtaaggatggaaatgaaaaagatgcagatggtaaagaaattaacggtaattccacactaagagattcattgttagcaattgatactataagtaaacaaaaagacattgatattatgtctgatgaatattgaaacttcattaaacttacttgttccattgaatcaatacatgcaagattttgaatcaaatttacataaattagccaatgaaatggaagttttacaatctagattatctggacttgatgatgaaataaggaaatcatcaaagatggatatgttacttacacctgtacttaatgatttattaatttcacctaaatgtatacgaatattacttaattctgaaattaatgaaatttgggcacaaagtttaactgaaatattagagaagaaggaaatattacaaaattcagattcacaaagattaaatcaaaatgatgttgaatattttttaaaacttattgatcaacttgaatggaaatgtattgaaagaattagaaaatttatgattcaaaatattaaatatttacgtatgaataattcttcaagtattaaagttcaacaaaaaatgcttaaagttaaggaaattaatttatttttccaaaaaaaagcaccaactattgctaaagaaattgaaactgcttatatttatactattagatggtattattattcaaattttattaaatatattagttcattagaagtactgcaaattgcagaaagtaatacaacaatgacatctaatagtactaaaaatttacctgttagtttacaattagataatacaaatgcaatcaatgaatatttgattaatttaccaagaagatatgagcaattgtttgatgaaaagaataaatatgcaattttagcaaaaattgcagagacaacatcatcattatcaacaacaacatctaataacaataacaataacaataaattcttctttgaacaaattttccaatttttaaattgtaccattattgataatattaatatagagtttacatttatgaatgattttttccattatgaaaataatgaagaaataaataatatatttaaatcaatttggtcaccagttttaaagctaggtaataattttacatcatatttattgaaaaaatgttcaaatgattattttggtatactatatactattcataagatacaaaatatgcaaaaagatgtacaacgtttatgtttacctgaacttttggaatcatattttgattcacaattaattcttctttggccacaattacaacgtaatatggatattttatcaacaagagtttcaagtacacttaaatccacggcgttaattaaacaagttatatcaagtaaaaatggaaatacattattagttccattacaattaacccaatcatttggaactgttattgcatcattgttacaaatacttgatattaatgttcaaggtccattagagggatctgttgaaagaatttctaatatttatgaacaaggtttagtacaattaagtgaaggattaagtgatgaaaagaagaaattgtttttatatgtcaatgtacaacaagtggctacagttttagatgtatcaggaggtgaaggtggtaaatcgttggcagaacattacagtaaattagctgaagcttatagtccataattgtccataaattatataattattaaaaacatactcatagataaattacccattgaatgatacttttattatactattgtcaatctcatggacattatggtccaatcgtggctatgacaaaggtaatagagttgatttacttaaaatatataatgataatgagatgagatgagattatccatgagatgagatgcggaaccgtcataaattttcgctattgtggtccctgcaaccacagtttacatttttgtggattatcttatcaagagattgtgccttgtgtattagatctgtgatatgcatttagaattactttgtggcaattgattcttgccaattggtctttgtggaggttgtattattaatgccttggatgttaatctctccttttaaattaactgtggtttttataaaaataaccattaaacttttttttgctaccacatgtataaaaagcatggcttcctctcaaagtgatataaattatatattataaaaatccattcaataaatcaagagatgaagtggtttaataaaagacgtgaatcaggctgcatcatttaggatcatcaactgaattcggttagttcaacatcatataactaatacatcggaaaaacttgatcatgttgaaacaattcatgttattaatggtgaattagaatactcaccagaagaaaaggttaatccattaggttattctgttgattcaattagtgttattgttttaatcttacaaggtgttgttggtacaggtattttcagtactccaggttcaagttttaaaatcaatgggatcaattggttcaacttatgttctttggttattatgtttctttttaccaattttcagtgtttacctatatattgaatttgcaggttattatccaaatagaaatggtggtgatgttgcatatttagaacaagcatatccaaaaccaaaatttttagttccaactgtatttgcagctatttcagttgttttatcatttacaacaagttcagctttagcatttggtcaatatattctttctgctgcagaagttgaagtaggagattggaattatcgtggtattggaattggtgttttaactttttcaagtttatgtattgcaattagtactaaatggtcattaaggattacaaaatgttttaggttttgttaaagttattttcatgattttcatggtttgtcttggttgggcaattttagctggtagtacaaaagttaaagatcctcatcaaagtttccataatgtttgggaaggtacaacaacagagggtaataatattgctaattctattattaaagttgcattctcatatggtggttatagttatgcattcggtgtagttgctgaatttgttggtaataaaaaagcaatagaaaaaggtgaagcagaaggtgaaaatgcagaagaagttcataataaattaatgttaagaacttttgctaaacttgttccattatcattatttgttatttttcgtcttttacattttaattattacagcatattatgcatcttcatcacctgaggaaattaagaattcaggtaattctgttgcaacattattatttaaaaatgcatttgaaaataaagctgcaactaaggcattatccgttatggttgcattatctgcattaggacatttaattacagctattttatcacattcaagatcattaagagaatgtggtagacaaggtattttaccattcccaaaattttggacatcaacttggccatttggtacaccattaggaccaattttcattacttggttagttaattttattatgattattggtccaccggctggttcagcatataattttattgttgatatgggtgcatattcaggatatttctttacattattacttatttttggtttattaaaagttagaagagaaagaaaattaaaaggtttaggtacaaagggacaatatttaccattaccttgtattattatattattattatttgaacttatggttattgcaattgcatttgttccaccaaagggtacattaattggtagtgatgtttcatttttttatgcaacttatccaattgttactattggattattacttgcatgtgttgtttattattttatttggaaatatgcaatgcctaaaataggtaaatatgttcatcgggaagttatttatagaatggaaaatggtgaaattggtaatactgttgttaaaattaaattatctgaacttgaggaatgggatagagaacattcaactgattccaatggtgttggtactagtgttgaagtttataatgttgagagtgaaaaggagagagagttagaattaaaatagtatctttgtatataagaactgtactgtatagcaattttaaatttattatttccagaatgttccacagtaatagagtggaaaaattaatatttcccttttgggaagtaattgaaataatttaaatacctatccacatgcatctttcttttagtcatctctttctttctttcaccaatagattgttagacaaagcaaaacaaatatgggattatttgactcatcttctaactcatcctcagataaaaagataaattctgttacagttggaacagattcaccatttgataatgattcagatttagatattcttggaatcggaccagtcggatccaatattacaggtacattacttaatacattatcaagaaccaatgatatggcattaagtgcacttgatatgttacgtggattacaaaatgatgttggtgatgttttatcaccattaacattaggtatttcaagagttaataaatatccaaatgaaattatttcaactggtataccaccacctgaaatttatgaagaatgtaaacatgcagatggtttagcagtttgggatcaacgtgctaattggcattgtcttttcccaaagagtaaaattccttatgattatggaactggtgaaaacaatgcatttggtgtaaataagaatgattcaggattatcacgtgaagatattgaaaatgatgttgatcataaatatgggatttattttaaatcattagaggaattacttggttggcaagcaagtatgcgtcgtgcagttgctgaacaaaatcgtcgtcgttggaataaatggcaatcaaatgaattatctaaatggacaggtggtttaaataaatttgataatgatgataatagtgatgagaataatgatggtaaatctgttgttggacaatcaagtgaaactagagttattactttagataatggtgatgttgaaacaactacttatcgtgttaaaacttattctgatggtacaaagaaagaatggaaaaatgtttccgttgtcggaccagactggtactccaaagaactgaaactaattaacgagaattataatgcttactatttatttatttacaattaatgacaaaacacccaaatgatatgataatgaaatatataatatacatgttacccaattttatataaccagtatataaaacaataataaaaaactaaagtatggaacgggaaaaaaagatagagaaattaaccaaaagcttcaacttcagaataagttattacaacatcagtattactggacattccagcaatagtttctagtgttgtatcatctgtaggtacgaaagcatttgcgacataaatccataaaggtgaatttggtggcattcttaaagagagaatgatatgttttttcaaagcagcagctgttacattgggtggtaagtccactgttgatggagatatctgattaatacgtccaatagccttaaatcgtactttcattgggggttattaagtataaatatattagaaatgacatgttcctaaagaagatcgaagtgttgatatttttttttttcaagccgtagctcacgacattgaaatgttgtttcttgaattttactttaattttaagtacttttcttcatttttcttttgccgttttagtggatcttatcttagagtatacgtgtagatatgtctgatactgataaacaagacgctgcagatcttctttctcagcttaatattgccgaatcaaaggcaaaagatgaaaagaaagctgaagaagttaaggaagaaaagaaggaagaaaagaaggaagttgttgaagtaagaaaaaaccaaaggaagaagaagatgaaaagcttgtgaaatctacatatgaagtcaaggttaaacttgcagatttacaagcagatccaaattctccattatttagtgttaaatcatttgaagaattaggattaaaacctgaacttttaaaaggtttatatgcaatgaaattttctaaaccatctaaaattcaagaaaaggcattaccattattattatccaatccagcacgtaatatgattggacaaagtcaaagtggtactggtaaaactgctgcattttcacttacaatgctttcaagagttgatgaaaataatagttcaattcaagcaatttgtttatcaccaacaagagaattagctagacaaacattagatgttattcaagaaatgggtaaatttactaaaattaagacacaattattagttcctggtatattagagagaaatgagagaccagaaaattgtcaagttattgttggtactcctggtgttgtacttgatttaattagaaaaagagttattaatgttcaacaagtacgtgtatttgtacttgatgaagcagataatatgcttgatcaacaaggtatgggagatcaatgtatgagaattaagaaattattaccaaatcaaacacaattagttttatttagtgcaacatttgcggatgaagttagaaaatatgctgaaagatttgtaccaaatgcaaattctttagaacttaaaacatgaagaattaaatgttgatgcaattacacaattatatattgattgtgcaaatgatgatgaaaaatttaagaatttatgtgaattatatggattattaacaattgcatcatcaattatatttgtagctagaaaggaaactgcagatttattatataaaagaatgaaaatggaaggacatgcagtttcagtacttcatggatcattagaaactcaagagagagatagattaattgatgattttagggagggacgttcaaaagttttaattacaacaaatgttttagctagaggtattgatattccatcagttacaatggttgttaattatgatatgccatttgataaagatcgtagacctgatccatcaacttatttacatagaattggtagaactggtagatttggtcgtaaaggtgtttcagtttcatttattgatagtaaaaaatcttatgattgtcttaaatttattagtgattattttggtggtattgatatgattaaattaccaaatgatgattgggatgaagttgaagaaattgttaaaaaagcatttaaatgatttttatttttttcagatttaaatacaatttaaataacatttataaaatcctacttagtactacatattttagacgctaaaaaccgcgatttttttttatttcctgaacaacatctttgggactttccgcactaacaaatgtagccctttttcttatctgacctctagttatcgagttatagccctttgaagttgattttttcgatttttcaaacgttcatatctttttctttatgggtcattgaaacacgctcattgtgtcattagatttggaattctttgaagtttgtttagtaatttacttgggatcattggagctttcctccgtccttgaaaggaatttttagttttttgactttttgtccatttttgaccactttcaactgactctggctccttcaaatacccctggaggtatacttttgaaaaattctgtgtgtaggccgtattactctcttcccaatgacaccatttttagtttttcaagtaagggtaaagtacattaaatatccatttttcagtgaattttggacgttttttttggggttttttcaagctatcttttttgttactttttgttaacaagtttaaattctcaggaattcagtttgtagatttgtttctaaattattatctgttgtaaattatggcggaaaatgtttttgtagaaaaatgttatcatttaatgtgttcaaattttgctctttttttttggcaaaaaatattaaaatagtgataacttttttttgaaagcctaactaaaaaacaatatttgatattttgtagagaaaattttgctcttttatatggtactgttaacgcctgatttagaagagattggaaaatgtagtgccttaaattaacgctgattttaacgcttttcaaatagttatagtgatagttgattacgtaaacgcgtatttaaaattcatgtagctgaatttttcatgttacagatttatttcagtgtctacagatttaatgaattctttacggtttacatactcaaaggtttactattgtagtgacatttgttattattagcttgttatcaaaaataaaatatgtagtagtaagtaggggtcaaaatttcccgtagggaaattgaaattaccaaacccaacgctttaagcgtcagtttccccttcaggggaaatgacaaaagagtcgattaggttcgtcacgcggaaactagtaatatactatataatttataataatataattagtgaccagataaacctttaactaaaccaacaactaaaccaacaattactaaagcaagtaaaatacataaacaaattataatccatttacattttctatttttctttgaaatattagttgcttgtataacattagcatcacctttctctaattccctttgagcagaatctatatttaaattagcattatttaaatattcatcttgttcaagtactatatcttgtaaatcattaaacatttgatttaaagttgcagccatttcttgaattttaattaattcatcatgtctatatttaacattttgataaacttccattgcttcagctttcctattttgcatttctaaagaattttgaaatacatcatcagtaccattttgtaaaacaaattcttgtgcttgattatatgaagcatcaggattaattatttgatattgttcaactgcttgatttgttatattttccttaaatttatcttcatcaattataacagttttcaaagctgaacggaaaagtctattaagattatttatttgattaaccatatcaggatctgaacgattaattattaatttagcattttcaatattatttttaatttcaaattgtaatgatttcatttcaattgttatattatcaatttcatataatgcatcttgtttagcagattcactaactgaattaatttgacgttgttgaagatcttgaagttgattagaatatgatttatattgattaatttgttcctttatctgttgacatgaatttaaaaaatctgatccactattaccataattattattgaaattatcagtttgaccacctgaaggaacataaggatcggagaatgggttctcagtatgagtcaaaggggttgtctgtagccattgtcaatgtgaatactagctaattacagtctctccagggagataaaaccagcataagatgattaccattagagtagggaggctggaaagaaaagtgattcccagttttccttgcagggggggaaaattccgaggactttgttgctataatgtataatatactggaatttccgatgtacattggacgttgttcttcttgtaggagtagcagagatgggtcgtataaggtttgtagggagtaaggtacaacggtcaactgtgtcctgtttggagtgtcgacgtagaaagaaaaaatgtgatgaaaagagaccatgtggtggatgtaagaagagaaatgttcattgtgttgataaggttattgataagggtgtaatgttaagaaggaagtaatggaggagaaaggtggatgatgaagataaggaagatgatagtaatagtgttacttactttgatagattcaaatcaactcgttgttaaattcaatactgacgattacacacctttggataatatcaatagcttttacagtttcaaatttggtaaagatttatcaccactgctatctccaatactatcacccagaacgatgcagatactggggagtgataatttaaaacttcctgatccaatttctaatttcacattaagtcctgctatgaaaattgatacagaattagaagtattagcaagaaatattgttgataagtttcaattatcaaataaattatcagatatttatcataatacctatagattattacttccaatatcatttaagagtaaaatcatattgattactctatgttcactgatactttccattacagaggaaattgatgcaactattttcttagattattcacaaaaacttacagaggaattaggttatcgaatagattatgtgggggggtggaatgaggatgatcttattgaatttattgtatgtttatcatgtcatacaattattgcagggtatttgtaatgatacacttttatggaaaacaagttttgaaacattatatcatacattgaaaaaaattggattagaaatgtttataactttaattcataaaagtaataataaacatattttcatatgggttgttaatttgttttttatcaagatgtttgtaaaataattaaagttacacaaaataaaaaattaggtccaatgttttcaaaggctgaatatttgaaatttatccatgatcatgatcataataatgataatgataatgataacaaaggtgatacccatgatatgcaactcactcaagtgaatagtaattctggtaattctggtatattttcagtttgtctgaatctctatgttgttctcggtgaggttaatgcattatatgatcagttctctgtcaggatacagagacttattgatagatattacaatgaaattaaacctatactggataacattactgatcctgatgatcaaattaactttgccaatactaaattatacttagattatgagaaattccgatctgatttccattactgggttcaagataagacatatttacttgaacaaagaatcaaagcaagtcaaatgaattcaaatgaaaatacaccacctgatttccaaacatgttgttattttgatttgatgaaaatgacggtactattatatatgaaatttaagataaatgaattaccagcaactagttatgaaattaagaatcttgtacttttattatttggaaaatttagaactttattattatacccaaacttttcatagtcgtctattattcccattacttatactaggagctaatgtatgtgaggaaagggatagagtgatgataagaggattttataaatcaatgatcaacaacaggataattcactaatttcatcacgtcgtagtttatcacaaatatggattgttcttcaagaattttggagattgaaccccaatggagtttcctttgatatgtggcaaaacatcatcaacaaatacgaatgggatatttgtattgtttaatagtatagacaattgtgtagatagacattttatagcttttaaagataaagaggtaagataacgataacatggaaatattaggtaatcacatcttataactatacatgtccaaaattatcatttattatgtatatacggttgatagtagtatgtttttgcttttggacaagacatttctaactgcaatttaacacattattcggacactatggaatatagtgatgatgatatggacttttcagtagataataatccatttgctggttcaaatcattgcttttcaagtggtataaggagtatagatgaaaataatggaagtgaaagtgagcgtgataatgatagtgaaagtgaaagtgaaagtgaaagtgatgatgataatgatggtaatgataatgaataatgatgacattgataatacaaatataactgcaattgaggaagatactactactactgctactgaaataacgaatatatcaattacaacatttgaaattataaaagatacagtttattataaaattcaaagtactaataataatacacatgttttacgtaggtataatgattttaaatcattaagaaattatctatgtaaattttatccatatttatttatacctccaatacctgagaaacattcaatttcaagatttttcaaaaatcctttccattataagaatgatatatcaataattgaattacgaattagattattaaattattttattaggagaattataaataataagaaactttcaatttcagatatttggtgtaaatttattgatccttatatagataattggttatcagttcttaattcaccaccatttacaaatctttcaacaaattcattattattaattcaaacacaaaatccaacaaaaccttcaccatatttttcatttataccaataccaccattaaatttattaaaaaaatttcaaaatgaattaaatgatgaagttttcaaaaatttagaaaatatattgaaaataattcataaaatttcaattaatttagaatctaagataaaggatataattcattgtcttaatggattacgtggtaatatggtagaattaggtggatttttaaatattttcagtattctagagaatcaaaatattaatattgaaaatttcggtaataaaattgatttaaattttcttaatattgaagttttaattaataatttaattatattatttaaggaacctttaataattattaaaaattcaatttcttatatgcttcaaatgttacattttaggaaattaaaggaacttcaattaatttattttaaaaatataatattacaaaagcaagtgaaattaaaatcattaattaaaaaattaaatccaattgatccaattccaattaataaaaaatcttcaagtccaagtattaatttagcaatttcaaatatgaataatcaatcaacaatttcaatttcaagatcacctgaagctaaaaaattattaataaatgaaattaaattattgaataatgaattaaataatttattaccttgctttaaattacttaataatgatgttaaatttttatcaattaatgttgaacgtagtgtcaataatgaatttacagaaattttaaatttattttcaaatgtaatgaataattgggcaggtactgaatacggtgattatttgaaaaaatgtacagaagtttggagtaaataatttaattaatttatataatgtatttataacaaaggtttaataatataaaaaaaaataatatttaatttatcatgataaagttataagacatgattataagattatttaataaaaatagaaattaaaaaaataaaccgaccagagtgaggattgaactcacgatcttgcgattaacagtcgcacgccttaaccaacttggccatccagtcttaattgatggtgtagtttttgaggattttgatgaagtgagttttttaggtaaaaatttttgcaaaaggcgttttttggcacatttgagtatgttaggagtattctaaagagttaattaagtatgtgtcaaagtttcaaaggaattggacttaaattggttgaaaaaattaagtttgaaaatttgggtctttttttaaggtatctggtaacttctattaattgatatcagttttaaaatagttcaaatactaattactgttttaaaaagtcattatatgtttactattagtttttaactcttattaaaacaatacagaacataagcatgtttatttatcttattctaagctgtgcttacataattaaatattgctcgcaataaacaaaaaaaagagaaattaataaagacttggaagattgctttctcttttaattttaatcgttgttgttcttttgtaagtatggatcctgcacaaaaagttgttagattacaataagatggaaatttggatgacgaggagtgtgttataaagcttaaatattatttacgtatttgttgtaatctaacgactgtgcagaatccatctcaactttcaacaacaatggttaagacaattttcaaaattacttttactttttggattttgcatgcatcaagttcatttttttatacttatccaacgtttctttgaattgcaaaactatgtctacaaatgaagcagaatatcgattatttccttgaaagagtccataatattattcatctatttcatcattcacaaggtttccgtttaactggtttggttgttttgttttggggaaccttgtacctattagagttacatcaataaaaataacaaatcttctaattaggtctgcaaacttgtcttcagacgaaaccttcttcctttttgcaaaaatactcatcataactcttatttgactgcagaaggtttagcaacaactcctaaaaatacaaagaaccttcagcagaaccgatttgaacacgttccccagaattctatggaagaaattgaacatcatgttcagtaaataaaaacataccaagtttagatgcttttttaattgacaaaatattttgagtagcattaggaacataatgaacatcatttaaaataatttcatgaccagtagtaggatgaactaatttaattttaccaattcctttaacttctaaagaatcttcagcaataccagaaatttgaccactaatagcttcaaattcaacaaattgatctttgtttacagcaatatgaacattggaaccaatatctaataattttcttgatataggtaatctagaattggaggccatccaggcaaaaccatttgaggtagtagtaaatgctgatgcaccttgtttagagacgcccgatgctgatgcagaagcaggagaaggagctgtacaatctctagcatagtgaccaggagtttgacatctaagacatgtaacttcatttgggtttcttttgaagttctttttacctctatttttgttattcttaaccatgaaagtttgaggaacggatggactaaaatcttcaagtgctgcttcaacagctgataaagttaaatcaggagcagcacagtctaaaactttggctttagctaatggtgaattgaacatcttcaagtagaataaacccatcatttgattaatttccggagtattattaaattgatagcaaacattcttaaaaatagctaacgcttcaccaggagaagcgccttttgttctggcatcaacagcagaatcaactaagttagatagttctctaacagagacatgtgaatatcttcttctgatcaacactaatagatcaaaaccaacagcagcatccgtttcaaatttatcaaagatagctggagcaacagtacagtgcaaaattgattgaataattaaggtcagaataccttgaatttgtgcacttaaaacatcagtagtatcaggagttaacatcaaatctcctgaagcaaaatagacatcaacgcctgcaccaacggtggccaacattttaccaacatagttttcccactttgggtagttcacagcagcagttagttttgcagaactatcctttggaaatagagtcgagatttgactcataacctgttgtaatatactaactctagatgcagcgttcattattaacaacagtaaaagttatttaaactaaataaaataaataaataattaaaaactaatctttagaaaagaagtattattaaacactcatggacatgttctggattaatctttgttcattttttttataatagtggatacttttggttctttatatgatgatttctttcttgcattagacctttctttaattgtagtttcattggctttgatttttttcttacaatttatataaatttaaattcgtttctttgttattaataatttatttggctttaaaatttttttaataaataatgtcaatgtgcatcaatttggtattgatcataaagatgctaaacccggtaatatattattagattacacgggaattattaaatttgctgattttagatctgcaaaagtaattgctgtttcaaatagtggtagtggtacagcaagtaataaatcagtaattatgataaaaattcaaataataataataatattaatagtggtactaatttgatgaatagtagtaatgtttcaatatcatcattgaatattccagcaaaaacagaatatgtaccatcaagtttaaccaatagtatttcaagttaaaccttccccagatgaactttagttttggtcaacatcaaacatttccatgttaaacactgttcatacagagtaaaatacgctgatcaaaactgtctacaaggcaggtctctagctactctagttgtcaaaatatttactgttgaaattgaaaatttactaactttacctttttatttctttacaaccagtgcatctattgctttgataattttaattcataataaacaccactaaatctctacattaagcatataatatcatccaaaagacccaattttgttttttgaaaaatacttctaccaactactataccaaccaacacccatattcccaggtaaatactcaacttacctcccataaaaatcaaaaagtcactttttcttttttttcttagcctttataaaatttacacagataccctctgacaaacacattccaacgcactgggtctcatatccacggcacctctgtagcccgagaaaaaacacatttttcattttgagatccataataccgccagaaattaaacacttttggttgcggccatatctagcagaaagcaccgtttcccgtccgatcaactgtagttaagctgctaagagcctgaccgagtagtgtagtgggagaccatatgcgaaactcaggtgctgcaatctttttttttcttgtagtgtgtcttttttgaagggtaacaaaattaaaatatttttattgtgtgtaaaattgtaataaattgatttaataaccatacttttttaacttatttgttaaacttatggatatcacgtgacttctaaacaaacctccattacaggacaaaccccagcattgaaacaacaactaagtggtcggatggtctagttggttatggcatatgcttaacacgcataacgtccccagttcgatcctgggttcgatcatttaaataatttttttttcaaatctttttgttttgcaaacacttgctttattttttattacttctttaccataacggtaagaaaataattattctcgtatgatatagtacattatgtaccataaacatacgtacttttcccattctaaacaatataatatcacatcattgaccagaatggaaactccaagctgatcttactcttttggcctaatcgataagataacacaacgttaagcgcggaaaagtttcatgaattttctattatctagaattttaaatttattttcattttcattataaaaactacaacggttttctttctggaaaaataaatttaatactacttcttttagactaacaatgggaaaaacagatacaaatactattataattggtgctggtattgccggtattaaagcatcacaagatttaactaaggcaggtatatcaaatttagtactagaagcaagggatagattaggtggtagattatttacagataaattaaatagtggattcccaattgatatgggtgcatcatggtttcatgattgttatgataatccgcttttagagaaatattggaaaaacggtaagactgaattcacatttgatgatggtagtgaagcttattttaatgaagatggtagaattagtgaaaatagtagattaaagccaatatttgaagaaattgaacttttcatggcagaatcttatgataaattaaaaattgatcaagatataagtgttagagaagctgtttatcaatatttacaaagtaaaaaatattgtttaacagattatcaaattagacatgttcctcaattagtccgtggattagaattatggattggttcttcttgggatattttaagttcaagaaatattgccgctgatgttcataaaggtagaaatgcattggttttaaatggttattcaactgttttcaatggagaattagatgaattaattgatgcatcaaagtattcaaatgttaaggaattattaaatgataagagtaaaattgttaataaatccggtgaagtatcaataaaacttaatcaatcagtttacagaattgaatatgataatactaataaatatattaaagtctacactaaggatactataaattcctaacaatattcaaatatttacatgtgaaaatataatatttactgcaccattaagtattttgaaactctctaataccagggaaaaaggttcaattgaatgggttcctaaattaccaactaagttaacaaatgcattagagagagttagtttttcaaatcttggtaaaatattctttgaatttcctgaaattttttggagtttaaatgatgatagatttcattcatttgctaaagttgatgaaaaattttacaatgcatgtaagaatgatttaccaaatggtccatcctcatataaatttgaaataagtagggaagacataccaattcctgaaggtagtgtaccaaatggtttagattataccattttatttgttaatcttgcagttccaacaggtaaaccagttatacttgcattaacatcatcaccattaacacaatttcttgaagaatctgatcctgaaactatttttaaagttttcaaacctgtatttgcacgtatttctggaaaatcaattaatgaaattccaaatcctattgaaataaagacgagtcattggagtaatgatccatttgcaaggggtagttatactggtgttactattggtgataattttgaagatgcattggaaatattatgtgatccaaaggaaattttcgatggtactggacgtgttagatttgcaggtgaaggtataattgatgatggtaatggatgtgcacatgctgcatggaaaacaggtaaaagagaagctaattatattattaagaaggttaataatggtaaattataatagttaattctaattctaactctaattttaattataattaaaactctaaaactgtaatattaaacaatatatagttgtatttagtttttaaaatagaaatagaaacaaaatctgaaaaatatagtaattaaaaagctattagtattatattatagatgcatttagtatggtgaaaagttaccatcacctcttccacctctaaatccacctctacctctgaaacttcctctacctctacctctaaatccaccacctctaccacctctgaaaccacctcttgtaaaaccacctctacctctaaaaccacctctgcctctacctctacctctgaaaccacctctaccaaaacctggtaaattagttcttttctgtataacttttaatggacgtcccttaaaatcagattgatcaagtttcaaagcttcaggaattgaatctgctgattcaaattcaacaaatccataacctaatggtacaccagtcattctatttgttaaaattgtaattctgttaattgtaccagcagatttaaataattcttgaagttcctcaggtgttgcttgataatcaatattaccaacataaattgatctattatcaatttcttgtctctcttcaattgttaaacgtttattaccttcaccatcaatttcatcatcacccataattggttcaccatcatcaccaatttgttgtaacttgattaccattttcaattatagcattaccagaattaatttcatcatcatcagccatcatttcatcttgcatttcttgtaatttagcagattcttgttccataattgatacatgagccctcaattgttccatttcttcaacagttgttgcagctgcaacttgatcagcatttaaattctctgtattgtccattttatccctagcttctcccctaaacgtgtatatatatactccttacaaaagcaaactcaactgatccctttccaaatgaatatcaagtcttgtgtgtagtcaatatctaagtcaaaatgaaaacaattgtcatgtaatgaacactcggaaattttatctcgcaattttcatctcgcaattttcatctcgcaattttcattttgcaattttcattttgcaaattttttgtgctggttcctttaagggctcatttcatttcatttcgatgggatggctttgtttcttttatttgataccttggtttatcatcgatatcggctgttatcatggtgcccacgcagctggttttgatatttctaacattggtatgtgttatatgtgctaataatgataaaactgtacccacaatgtcaataattgatgttttatcatcaaatgaatcattttctgatctcatatcaatattacaaaagagtgacctcattgattatgttaatacattagagaatgttacttttctagcaccaattaattccgcatttgcaaatcatgatataaagagaggtagtaaaatgtcaatggatgaattagatagatttataattgatgaaccaattttcagagattatattaatggtatttccatattatcaacattaaatgaatcaaggatctccatttttagaagggtttcaaatacccattttgttagatcatcatattgaaccagatgagaatggtgagctaattaaagaagtttattttattgaaaatgctaatgttatatcaaatgatacctatttatcaactattgattcagttgttttaactattgatgatttattaattgatccaaaggaatctatttgtacttatttccttaactcacttaatagaaatacaggtaatgaacattttaaattgtttagtagtttattaattagtgataattcatgtcaatactatcaattctcaaatacaactatcttattaccttccgataattcacttcatttgaaccccgttgagaggaaatatttactgaatattagaggattaaatgataaatctttattattatcaaactttatcttacctggtataattggtggtaatttatacaataaaacaattgaaacaactaatatgaataatgaagttttggaaatttcatcatctgaacttggtgatgagttaattatcaataataaaatacactcatcagcatcaaattatttattatccgatggtataatccattatttcaatcatcctatatataattattcaactaatgataatttcccagttttcacaccaagaaagtatcttattggattacaatatgaggaatttgttgatgaaattgattttagacaattatcatcattaattgatgataattcaattaatcaaacaatattagtatcaaatgattattatcaaataactgaaaatttacaaaatagaattaaatatcatttcattgagggtaatgattcaattaatttaacaaatacaaattataaattacttacatctaagctgtgctataatgaagatggagaaaaattttgtcaaaagattaaacttgaaaaatcatcatcagatactgataaacttttattaaattcaaatattgaaatattaaataaacaaccttatattataggtaattcatcaatttatatactagatgatgatattacaattcctaataaattacaaattgcattagcatcagaattaactggacattctaaatcaattgaatttttcaaaaaatttggattattaaaatctttatcaagggtaatgatgaagtttatactatttttttcccatcttcaaaactttggaatggtttggatttagttttagattatttgttgaaaaatgataattctcttaaattaatattagaaaattttattattaaaggtagtttaatttatcatgattttgatgatgttaataaaacttgtacctacatattcagataatgagataattatttctaaaattgatgatgatgtagaaaatgatataacagttttacaaatcgatgataaaacattcgaaatctcatttgatgatgaaatcttatattccaatggtgttgttcatccaattaatgataatttaatataccctgataatattgaaataactaacatcctgatctattgaatattcaagatagtaatgaatttttaaatatattggataaattaaatttatcctcatatattcatgataattcatattcaattatgttaccaactactaaatcattatttcaagagaatataacacatttacttagtgatattaaatatttagaaaattttgctaaattacatattttaccaccaggttcattaaatgatataattaattgttataatgaaaatggaacaagtacattaattccaacattattaaataatacccatttaacatgtcgtcaattagaatctggtgatatgatgttaagtataactgaaggtagtaagaatgagatacgtattttacgtaaaggtttaacaattccagaaactgaaatattgtcaggtattttattaattgatcgtccaattaatccaatttggttaaataaatcaaataataaattatatttacatttacctttattttctatatttttaggaattttaattggtgcattgtttgttattttattggttacatttttcttattaacatttgatacaagtaagaataataaagggtttaatggtggaaataataataatgatgataatattagaattgttaatgttaatgaagcaacaccattattgaatgataatatgattgatgaagatgatgattttggtgatacttttgatgcagaagaagataataattataatgaagattttaatgaacattttaatgaacaatttgataatttagatgaatataataaacaaaatgataataataaatctacatcattaaatagtggtaaaacattaagaactgaacttaataatgcaagagtaccgaaatttaaaaaatataatacatttgatagcaattattcaacaaatgcattagctgaaccaattgatatgaaatttaatcaagtttaatgtatataaataaaataaatcgatatataaataacaatatgtaaagtttataaataataatgtaatatgggaatgaaaaatgcatgcaagaacaaaagtcgttaaatttgaaaggggaataagaatataatattattaatatttcattgatatgcacgtttaaacatttctaataatgcatgataatgacctaaaacaccaccaatgacgaaaatatgccataaattatgagaattaccaatccaatcaatccaccataatgatgaaaatttatttgaatgacaagtatgttttggttgttttcttaaataagttaataattgatttgatttatccagtttcattatagtttcatcagatatttggaaattatcaatttcaacatctgatctaatacattcagggaaaaatgaaccataaaaaacgacacctgataaataccaaccaaatgagaataataatggactaaataaatttaaacaataggaaatattatgaacaaaacatgaacaaaggaatgaaataacacctagacctgctaatgatacaaagaataaaattcttataattcttgattcaggtttatcaaaatatggatgccatgccataccaataccaactaaacctgcaattattgaacaaattacaaacattaatctcatattagggtaatcctttaatgatatatgttcagttgttataattgaagatgtaattaatatagttattccactataatcaaaacaagcaaattttgaacgtatattaagataaccaatattagtataactatgccaaataactgaaaacattaaacaaataattgcacttgtaataaataaatacataattaaatgatcatttttagatggaccataaatttgataagtatttgaatttgggtaatcaaataaacctaaatataataaataacaagcacctaaaagatgagtccaaatattaacagtttcattatgccaataaaataaacttgtaattgcagaaacatgagatttagcaaatctataaccataaattataaatttattctctctccattgaaatggtaattcaaagaaatttaaatgtctaaaatttgaaattgtcattgcactatcataattatataaagtatccttcagtgcaattaaccgttcattagggtgagttgctaatggaggtaaattatgatgtttttcaaaatctgttaattgagcgttaagtaattgaattgatttaataaattttgaaggttcagtatgatcattatcatgatattcgaattcatcaattatttgagataatggatgtaaattatattgatgatttttatttaagtaagatttaactgattttaaagtattaacaatacttgtataagttggagtataagattttataattgcagcagtttcaccaacttccattgataatttattttcaaaatttgttaataatgaatcaattttatttaatattaaattttccattaattcaaatttatcgatatccatatcaatacttgatttggatatattacgtttatgagatttcccatcattattaatattttgggtatctagaatagttgaacccgtagttgatgccatcattagttgaattctaataccaggatcagttggttattacaaaaaacagcaaaaacagaaaaaacagaaaaacagaaaaagaaaaagaaattataacatgaaagttaaaaatattttaaaattaaaattaaaatcccgcccattcaatactgaaacatttcatagactctgtactgtctttatcttctttatcttcttttaatataccaccaacaacccatactttcctaacacctgtagccaatctacctctattacataacttctttaaattaatatcatcattataataatctaatgaattgattatttgatgtgcatgatatcttaatggatcaccagggtatgaaacgaaaataccaccaaatctcatacctggtaacatcattaatcctttagattttaaatatttaaacatttgataattattaattaattgatctctattaatggtacaatcctctatttccttaattattaattgttcaattaattgttcttcatctgtattattattattattattattattattatcaataaattcatcatatgtaggtgtttccataaacactattttattccttttacttctctcctctatctccctctcttctaatttagcatccttaattgctttctccttacgttgattatcttcaacaacttgttgtaaatcagtcatacttgaactatttgtcttcatttttaaattatctaatgatttaatatgtaatttatttttatttggtctaattatatttaatctcttcatttgttcttcaatctctctttgtttctcattacgccatttatctaatttatttgataatttattaatcatttccccttgataatttccatcatttaatatcttatctaattgtttattattttcatttaataatattaatttaacaattcctttattatataaccataatgtttcataaatagttaatctccaggggaatccaagtaatgaattttgttgtggtgctaatggtaaagtacctgataattgtccaacaattccatattcaatacttaattttttcatatcttgtaaattgaaaattaatacatgatctccattaatgtaaattggtattctatcatcatcattaatgttatcttcactaacaatctcttgtatcaatggagatgatcgacgtgcaatattattattactgttcagtttggttaagttcttattctccatatcgaaaagaagtaagtaacatatacatgtgatagaaatattttgagaatatatttttttcttctaatacaactaatatacacatttttatatacaacaagacaaattatacaatattatatcacatcacatctattcttcctctgatgatacatcactatcatcatcatcactactttcatcattattattattaccattattaccattaggacttgaatttttctcaaattgagctaatttttgctttaattgttcaattttttgttcctcttcattatcatcctttttaacttttttaacttttctcttacttgaaactaaataacgatataatcttgataatgttgcattatctaaactatccatttctaattcaatttcatcatcatcctgtaaatctggtaatccttctttaataattgttataacatttttcaacattttttcattaatatgttgcattgcttcacttatttctttcttcatttcataagttatatgttttggataaataccattttcatcaccattattattattattatttttcatatcataatcatcattatcatcatcatcataatcaaattcattagattttcttttctttgttgtctttttctgttgttgactaacatttgattttcttctattatttatatttttacgtttttgttgacgttttttattccattctttctttaattgattatatttatcttgtctcattttttttaaatcttgagtcattctttcaatacttgataataaaaattcaattgttggatcagtaattgaatttatatcaatattaaattcttcattatcattattattaccgtcatacatttcatcattatcaaattcaaattcactatcattatcatttttattatcattatcactttgagatggtgaaattggtgttaaaggtcttttagaccatttttcattaaaaatattttctaatttatgacccatcatattaactgcagtaccttcaggattaaatataaaacaatttgaaaacattaatctaatatctttttcaaaatcattagcagtttcatattcaccattatgtaatttattttgaattgtacctaaatccattggatttttaattatatcgaaataatttggacaatccattgtaattggatcaacaggttctaaaaagggccaagaaatattttcatattttttagaaataaaatcttttaaaattgattgacaatatcttaattcaggttgatatttttttttctttggtctaatatcataaggcatatcttttggttttggaggatgaatttctctctttggacgaccaccaccgctgattaaaggagttgaaattgattttgatgaaattttctttgaagatgttgattttttatcaggtaattcctttggaggtaaattatttatatgtttttcaaaacttgaaagtatatttttaaccattgaagaaatagcactatctttaccattaaatttaaaacaattttcaaccataaggttaaaatcttcaattaactgaattggatcttcatatgcattaacatttaattttttttcaattgtacttaaatccattggtcttttaatataattataataaaatgggatatttaatttaactatatcaactggattaatgaaaggttgagcatcctttaatcttcgtattgccttgattgaattaagtaaatattttttttgatgtaaaggcattggatttgtaggtaaattattcatatcaggttcagatggtggtttaggtgcaggtatcattggaactggagtagtgatagtagtagtattatcattattatcattattactatctacaactggtggttcaacagtatcaatagcagcagcaacagaagactctttcttctcctccacagacgcgactgcagggacattggggactgcctcaccttcaacaatgccaattttttccatgtctctctccttaagtgaggaaaacttcctttttgcagtggaaacaagaaataaatctggtgccaatgaaaagagcgaattgtgtctcttttatagttgagtgagtcatttgcgtttttcttgaagtgttacgcgttttttcaattaaattgatgtctttaatgagccttcgtgcagtcgcgtcggtgctttttttattttcggatataatcggcttttatttcttttcaattctcttgacatgaatatttaatttgtataccttgatgatgatgatattctttttaatattccttttatacaactcttatacacaccatgtggtcttctaaactactggtgtatcatcctcgtatatccttaatatctcataatacccataatttccttaaatcatcatcttcttctcttattactaataaaagattcttctctaattcattcatcaattataatattaataataataataataacaagactgtcaccactccacctactactcctgtgaaaccaaatttaattgcaaattctaaaaaaattgaaaatggtccttcattaccaaatatttcacaaattaaaataattaaaaatttaatggcttatctttggccaaaagatcaaccttgggttaaatttagagtggtttctgctttaactttacttatatctgctaaattattaaatgttcaagttcctttcttctttaaatcaattattgatcaaatgaatattgattggaattcattaaatatagtaggtttagaaaatttaacaatattaccacctgctatttttgctttaatttttgcttatggtttatcaagattttgtgctgttttatttggtgaattaagaaatgcaattttcgcttcagttgctcaaggtacaattaaatcagttgctaaaaatacttttattcatttattaaatatggatttatcttatcatttatcaaagcaaacaggtggtttaacaagagcaattgaacgtggtactaaaggtatttcctacgttttaactgcaatggttttccatataattccaattacttttgaaatttctgttgtttgtggtattttaacttataattatggttcatcatttgctgctgttactttattaacaatgttaacttatacttattttacaattcgtacaactacttggagaacaactttccgtcgtaaggctaataaagcagatcaagaagctgcttcaattgctttagattctttaattaattatgaaagtgttaaaatttttaataatgaaaatttacaaactttaaaatatgataatgctttaactaaatatagagattcatcaattaaagttggtacttcattagcatttctaaattcaggtcaaaatttaattttcacttctgctttaactgcaatgatgtatatggcttgtcaaggtgttgttaatggttcattaactgttggtgatttagttttaattaatcaattagtatttcaattatctgtaccattaaatttccttggttctgtttatagagaattaaaacaaagtttattagatatggaaactttatttaaattacaaaatgaaccaattaaaattaaatcattaccaaattcaaaaccaattgaaattattaatggtgaaattaaatttaataatgttaatttttcttataataaaggtagaaaaattttaaataattgttcatttactattccatcaggtcaaaaagttgcaattgttggtccttcaggttcaggtaaatcaactattttaaaattattatttagattttatgatattgataataatagtaataataaggcaacttcatctatacttattgataatcaaaatataaaaaatgttcaattagattcacttcgtaaagaaattgcaatggttccacaggatacaccacttttcaatacttcattattagaaaatttaagatttgctaaaccaaatgcaactgatgatgaaattaatgaaattatttataaagttaaattagatcatttagttaaatcattaccaaatggtgttcatacaattgtaggtgagagaggtttaatgatttcaggtggtgaaaagcaaagagttgccattgcaagagcagttttgaaaaattcaaaaataattggattagatgaagcaacatctgcattagatacaaatactgaacaagaaattttaaatactttaagggatgttttaaaagaaggtacaacatcaatttgggttgctcatagattaagaactataatggatgcagataaaattattgttttaaaaaatggtagtgttgttgaagaaggtaatcataaagaattaattaatttaaatggacaatatgctaaaatgtggcaaattcaagaagtttgggaagaagaggaagctgaattgaaaaaggaactggaagaaaaggaagcattatataaaaagagtctcaattaattaggacctatatttctggaaatatacatttaattaaaatatcaattaaattttgaattaaaatttcatttatttcttgatatttaaataattttaataaattattaactctaatttcttcttcattattatttattattgatttattttttaaaaattttaaaatttttttaatattcatttcaaaaatttcatttaattcatcttcattatttggtataaatcttggtttcatatcaaatttatcatcattagggaacattaaatgtcttaattcattaattattttacttatcttttcatcatttaaagattcaattatattttttttaataaaattatttataaatttcttaattattgtaaattccattatccattgaataaaaattttaattattatcataattaatgggaatttattatcacataatgtaattatattaattaattgtaaaattggtgaaaaatctgtaaatttaagccaattatcaaatctcatattatatttatcatcaattataaataatttaattaaatctctcttacttgtgtcctttttcttttcattatcattattatcacataatttaccaataatttcccaaataacataattttgtgaaaaattctttattaaattacccattatgataccatcaaataatgaaattatgaaatcttttgaaatttcagattctgtattttcatttggtaataataatttaattattgattcaattaataataatctatattcatcaatatgatcaattccataattatctaaaaaaattttaacaaattcttcattattatcaattacttgcaatttttcaatttcattaaatttagcaatatgattatttataacatatggtaaatcaataattaataatttaataaaactatcaaatttttcattaattctaccttgaatatttctacaaatatgtgcaaataaaaatattaattcatttataaattcttcaatattatttaatttcaatgattcaacataccatgaaattataaagtttttaattaataatgaaaataatgcatataatgataaatcaatcttatttgatgatgttaatgatgggaaatcttttaatttattattaggtgataagatattctttgttaattgctgtaaatattctatatcgtccgatggtttgatacgttttccccgtattatacgtttctgcgttattgacattagttattcgatataagaaaaggtcgttgtgggtatagtgactgttacgcgttggttacatgattttccatttagcttcttttcattttcatttcttttcttttggtagggaaatgacaagtgattatgatgatgataatgatgatgatatctttgatgagttagagaaggaaagtgagaaggatgggttctttgataaataccgacaagaaaagataaatcaacttaattcgattataaggagaaataataatttaagtaattattatagtgaagtttcaacaaatgatgaattaattgaattaatgtcaaagaagattaaatttggtaatcaattattgatatttattaatgaaaattttatttcttgtcaattacttgttaatttaattaaggaaattatattgaaaaagtaatggattatttaatgtaattattgttaatgctttaacagtttcatttattgttgataaattgaaaattaagacattaccaagtttggtattttataataatggacaacaaattaatattaaaagtaggattaaatggattacttgatgatccatcagatattaaatcattaagtgaatataaattaaatgattatataagtaaagtgttttcgttaaataaaagagattatgatagtgataatgattatagtgattagttatataacttttttaaatagtaacttcttcctctttgatagggaatgatatatgagtaactccttcattataataatcatcatttattggtatatcagtttcaatttttataactttattgttattatttaaaatatatcttgatggatatgaaccttcctcataattaacaattattggagttgtaactaaatcaattaattcatcattatttattttattctttgccttaacgaatctctctcttttcaaaaatcttgaagatgaaatagttgttatataattatcaatttcaatttcatgtaatttaggtttccaaggtttatttattggatcatttgataaaattgttaaactatgttccattaaaaatgatccttttaatgaactcattggattatatcttttaaatgggaatgtatcatctaatattttagttatttcaaaacaatattcaattaattcaggatctaaaaatgttaattcattaagtatattattaggatttaaaagttttatctttatttaataaattaaatgcaatttcttgtaaaattggatcattattattataagttaaaaatcttaaacctggtattaaatttctatttaaaattgaattacttaaagaatttgaatcattattacctgttaaaacattagaaattggttttaaaactgtatgaggatcatttctacgtgtatgagccattaaaaatatcatatgtttaaaattagggaaatgaccccaatgagtaaatgagaataatccttcaattgtatttgcatcatcattaacaaaatcatttggtaaaattggtaaaattctatcatttttattaatatcataaatacctaaaccttcaagccatggtaataatgatggatgtacaattgcttcatcaagtttatattctttaacagttttcaaaaatgatgaagtaattaaattaggattagttgaatgaacaacataaatataacgtataaacattattaatgattgataataaataattggtaataaatcagataattttgatcttggtttagataatttaatatctttcctaataaacattgaaactgtttctaaacaaagtccaaatgatggtataattttaattaattgattattatcattagatgttgattcattaattaataatttaaatctattattattgaaaatttctttaggggtacgtatattataaatatcataataatcaataccaaatctttgtctcttaggggttatatcatcgaaatctgcatatcttttattacccattgtgtgtgttatatatcttttcttactttataaagtgatgcattctttattttgactttctgatgtaatgaccaatttgccaaatttgttagagaaaactcgttgtttgttacgtaagcgagtctttttcattttctaaaatattaatagaggaaataattcttgcattagtcacaatacttttttaaaaagatttgtttaatttttttatgaattgtaattattacaagtttttatttaataatttaataatacgtcacgtgaccttctacattaaccttccattacaggacaaacctcagcattaaaacaacaactaagtggtcggatggtctagttggttatggcatatgcttaacacgcataacgtccccagttcgatcctgggttcgatcaattaataatttattttttttacaatttttattgttttattattattattttcattataatctcaccattctttaagtaagagaagagttaaagtaagattaattgctttttaattctttttattggtaaagtaataacaatactaatgaataaatatagtaatattaataatattaataatattaataatattaatactaacatacgtacaattattcaaaaacgtaattttataaaacctttattattatcattaagtacaattgcatatagttcaatttatcaatcaacaacacttgcaaataaaattgaaaataatgaattacattcaaataaatctaaaaatgaaattgaattagagaaattatcaagtcgtaaattttttaagagacctccaaaattatatgaaaatcatatacctacctatacttatgaaaaaatattaatgtttattggatcatcaattggtgcatttttacatcctgaaagaaatgaatttattgttacattaggtgaatcaactgcaactactaattttttaattaatttaagaaataatatgttaaatgattcaattggtagaaaaattttaaaagatagaccttatataacatcaaatatacttaatttagaaaaattaaagacatatcctgaaaattcatttggtaaatgttattataattggcttataagagaaaattgttcacctgatacaagagttgatgttaaatttattgatgatgaagaattagcatttgttttccaaaggtatagacaatgtcatgatttttatcatgcattaattggattaccaattttcagagaaggtgaaattgcattaaaatttttcgaatatttaaatattggtataccatttgcaggtttaggttcaatatttgctccttggaatgtaaagaaacaaattgaaagagagagattatttaaaatttattatccatgggcattgaaaactgcttatcattgtaaaaaaaatttaattaatgtttattgggagaaaataatggataaagatgttaatgaattacgtagagaattaaatataactccaccacctgatatgagatcattaaggaaattatataaaaagaatattgctaaataagtatttctatagagatttaatgacatgacatgaaaaacgcactgtaattgattctgttattattattattattattattatcaacactttcttcttttcaccattgacatcatataacatgatgaaatcatcttcattatctatactatttctattatcattgatacttgcattaggatttcttaatatagttttatcatgtgcattatataatacttattatccattatatgttattttagttttcttaattgctccaataccaaattctttaacaacttgtatattacaatcaaatagttattataataataacatgaatgggatattcagatattgatgattatgatccaattttaactttccaatcattaatgaaatttttaactggtatgttagtttcaagtggtacttttttaccaattgtattttggagatgtgaattaattccaactggtagtttcttacttagtttaacaggtggatttttagtttatttaagttttgcattatttggtatgggatttactttaaaggaggaaaatgattatgatttttaatttataaagttaattaaattaaattaaattaaattatatagtgtacattaaataaatcttattacattacatagctggatcatattgatcctcatcatctacctctgtttctgtcttcatctcaatatcaacagatggtgtctctattgtttgttgtggaatatttttaatatcattattatcttgcctttgtctctctcttaaatctctctctaatctcatctttgcatcataatcttccttatcctttaatctctttttcaatatttcttcatcacttataattttaaatctaccatttaataaagttaatttaaattttggatgtgaatcattacaatctttaccctttggacaaaatcctgttaaataattttcacaaatatttcttctaatatgtctttttgaacattttggaccatcaggacaaaatcccatatttgtataattccaacattcaggtattttactctttggatcaacatgtaaataaatacattcaggactttgagaacatacaccattagctgcataatatgcacattctggcattttagataaattatattcatgtaaaaaatcacaattatcacccattttacataatcctcttaaccaatatttacaaacaattttatttttaaaaccttttgatggatgttttaaagggcattcatcattaagtggacatgatgtataatttgattgaatccaatattcacaaattggtctatcaggatctaaaccaaatttaaattctttattaagaaaattttcaaatgaaaaatgtattctattctttgatttatttttaacttgttgaattaaatgattttgttttaatacaattgcaggatcataatttgataaattatttggatcattaattgttgaaattgtatttatattggtatttatatttgtatttatatttatattatttgaagtattattcggtactattggtattataggtaatggtatatttgaaatcatatttggtattggaggtatattaggcatacccattggcatattcattggtatttgcatatttggtggcatactcatattcatcatacccattggcatattcatatttggaatcattggcatattcatatttggcatcattggaatatttggcatatttggcatatttggcatcattgacatattcattgacatattattattattattattaggtactttaggtaattgaggagttgaatttgaagttgaatttgaagttgaaatattttgtgattgtgatgattgtgataattgaggtactggaggtaaatttggtacaggtggtaaattacctctaatgggtatatttgattgagatggggatgtagatttatttggtaatgatggtggtttctgtgggatgttcattattgtattgtttattgtatattgtatattattaaaagaaaacaagtgttagtaagcagtaaagttataatataaggttaagaaaaatgaaatttcaagattttccaactttccatgttgttaattaatttatttattgaatactttcttcttctgccaatggcagaatatacattacatcagatcaataatcaggtagaacatactgaggaattggttagtaaacttagaggatttttcaaaatctgtgcaagttcatttacaggtcctgatggtattgatgatttcgttgatagtgaattactttgtttcttagataaatcatcaccaggtcaatatttttatctgttacatgatggagaacttgcatcttcatgtgttgttttcactaggaaaggttatcatgcaaatacaatgaatttaggtattagtttagtttctactaatgataagtatagaaagaaaggattagtttctaaattaatcaattgggttattaatcattatgagggtgttaataatgaaagtagtgaatttgaaatcggtgaatcaattactaatggaagttcaattgaatatattaataatcaattaccaattaaaattcgtaataatggtaatgttaattggacattatatagtattgttgatgaattttatactagatttggatttaaaccatgtagagatttagaatggttagcaattcaacaaagtgagattcaatatgaaccgttcatttttagggatgatggaacagaattattaatttcatcccaagattcacatactattacagagggtaagaatgcatttaaagttattaatgataataaatatcaaaattgtgcacctgaaacaactactttcccatcatttattaagagaggacaattatacattgatactcatttaaccaatgatatgaagggaaaatcatttctttatgataattgtggtattacaattaaggataatttaacaaatactgaaacaagtgcatttatttgtcaatttttctatcctggtacaattgtcattgcacgtgttgttagtgatgtattagataaggaaacatttgatgatcattggaatagaattttacaatttgtttatacttatgcaaataatgcctggaatagtttcccatgtgttaagagtaagagtgtaaagagtaaagaaattgcaattattatggcaaataatgatttccaatgtaagagtggagttattactaaggaagagtttgttgataaacttacaggtgataatggctggcataatgtccaacaggggatattcctacctatgatacgtccatggagagatgctgttgaagaggaagaagaggtttcaatagctgataatggcttttggtgtgttatgtaagcatttagaatatgaaatattttcatttcttttacgtgtttgtttattatatatcttatatcttattgattagttctttgtagacagctgtagaacagtgtgtatatagtatagagtactatgtctagacattatgataggaatgtatcaactgattcaccgcaacatccaatttcttactcttcaagattagatacttttaaaatttctcatatgtttaatgatgagccaatatcttataaaacaacatcatctgcaaatttaattccattaaatttacgacccttaggaatggaattagttcatattcatactcctcaatggttatcccaattaggattttattatacacctcaatcaattaaattaaaatattcaataacttgttcatgttgtaatgaattaattaatcatccaagttccaattaatattgatataattgattatcatttatcaaataataataaatgtatttatgctcaaatttggaaatttaggaataaaataattgataaagagacattagattggcaaaatgatttaattttcggtgatattaataaccctattggtttagattatagattgaaaactttccataataataattggaatcatgaatatcctaatattaatgatatgatacgaacgggtatgtattatgatcctgaaaatgataatgatgatagagttatttgtatgtattgtggattaaatttaattgaatgggaaaatgatgatataccaaatgatgctcattataattcaaatcctaattgttgggtatttaatcaacaaaagaaaatagaaatggaaattgaaatggaaatggaaatgcctcaaatagaggaatatgatcatgatcaggaactacctgaatatggtaatgaaatacatgatattgatcattcagttatatcattaacaaatacaacaactgatttaccaattgaaatagttgaacctgatgaaattgaagaatatttatctaattctaaagcaataagagatgaaaagaatgatgagaatgatgagaatgatgaaaatgaaattattaataataaacgtattataccaagtattaaatcatcagaattaagtcaatttttcactgaattagatattgatagtgaaaataatattggttcatcatattttgcaaataatagaaaacgtagagaattagagaaagagaagatgaatataattattaatactgaaccaattattgaagaaattagtgatgatttaaggaatgaaattattaatgatgatgaagaagaagaagaaggaggagaagatattatggattatgaacctccaatgaatgataatatgcctacaattgatgatatggatataggtaataatgatattgaaccagttaggaatgatattataaatgatgaatctatagaacatatagaacatatagaacatgatgaacatatagaacatgatgaacatatagaacatgacaaacctatagaacatgatgaacctattacaaatgacaagcctattatacctccaatgccaaattcaacaccaaatattcgttcaagaatccatacaattgaaaataatcaattagattcaacagggatagataaacaaaatgaaattaaacgtgttgaacaattagagaatgaacttaaattacttaaaatgcaaattgaattattaacaaaaaataataatgttaaggataatatagaggaaattgcaaatagtcaaatttctaaaactgaacaaaataatgtggaagatgatattaaagagaatgaacgaacaagataaagaaaatcaaacacctattgaaaattcaaatatttctaatataataattaaaaaggaaaaaatagataccctaaaagaaaagaaaaaaaataaaaaacgtaaagatagagaaggtaaagatggtaaagacaccaaagataagaaaaagaggaaaaaacgtaaaatatcagaagaattagagaatgatccattattaattaataataagaaatcaaagaaaaaattaattaaagttaaattagagaaaaataatgatgatagtttattatcattagatattaattcattaactagtgaaaagaaagatgatgaagaggaggggaaagaggatcaactgaaagaaattgagaaggttgaggagatgaagcgggaagaattgagaagagaagaaattaggaaagaggagttgagaagggaagaattgaggagggaagaaataaggaaagaagaactaaggaaggaagaaataaggaaggaagaaataaggagagaagaactaagaaggaagagattagaaagaagaactaagaagggaagagattagaaaggaagaacttagaagagaagagttgagaaaagctgaagaacataggaaacaaaaagaaaaagaagaacttgaaagaaagaaaatagagaaaattagaattgaagaacaaaggaaacttgaagaagaacgtagaaaagaggatgaaaaaattgaagcaatgaaacaagagcttaataagacgtgaagagatgagaagagaaagaattagaaatgaggagattgaaaaggaaaagaaggaaaaagaggaagaggaaaaggagaaaaaatctaaaattattgtaaattcaagtccaaatgttcaacaagatattcaattaagtgaagttagtgaaattccaacacaaatggatcaaagtgataattttaaggattttactattgaaaataataatataaataataatgatattagccttaataaaagtaataaaaatgatacaaacaatagtgatatatcacctacattaatgagaaaaaatgcaagattatcaacatcagttgaagttgaaattgaaaataaagcattatcatttgaacatttacaaaatttagttaataaaactgaagaaaatggaaaagggaaaaggaaaaggaagagaatgaaattattaatttccaagatattgaaatgatggataatcaaagtaccccatataaggataataaaattcgagaaatagattttaacgaaaatgaaaatgaaaataaaagtaataaacataaatggaagaatattgatgttaagaaatacaatgagttttattcagatatcagggaagcagcaggatatgttaaagaagtaattgattcaccatatgaattacttggagatgatttagatggattattaacagaattcagtggtagtataccagatgaacaattacagatgacagttaaggaatggttacaatgtcaagaattacaggcaatagccattgtaagagagaaggctaatgaaatgattgaagagttcagaagagacggtttgacaagtattgaatatgttaagaacttaccagagaaatagaaatagaaatagaaataaagaccttacgtaatacttttactatgggattacgcgggggcaaaaaaagtaatttttgtatcagatttcagatttcagatgattgatattttcgtatttaagataaccgtatttctttttgtagagtttgtgtaataggtgatttaatagattagattagattagattagattagattagatatattccaaaattatggaggcacgagatattggtaatataaatattaatattgacattaatggcaatgggaatattaatttaaataatcatattattaatggtagtgggaatgggaatggaaatttaaatcataatgataatggaggtttattagctgaaactaacagtatatcatccgaatcttcattggctaattccaatattagaataattagtaataatcgatttatgtcaagggaaaatacggatattgatatggattcaaatattgatactaataatgataacgataatgatgatgaagaagaagatgatgatgaggaaaatgataataatcgtataattaataataacaacatcggtgataatacaattgatatggaaaatgatccagatactgatgatgaacaacatgcaagaagtcaaatattacgtacaagagctagaactaattcaatttcattacaaagaatatctttattaagtgattattcaactaaagttggtggtgcaatatctgttttaccacctgaaatgttatgtttaatttttgcttatgttcattctaaaaaagatttattatcaattgctttaacttgtaaatattgggctgatttaattatttcaatgatttggtttagaccaggtattaataatagaaatattttcaataaattagagaaaacaatgaaattagattctaaaacaactatttggaattataggaaatttattaaaagattaaatttatcacttataccaggtttagttaatgatgattttcttaatttatttgttggttgtatgaatttagagagaattacattagttaattgttctaaaattacttcaaattcaatttctaatttattagaaaattgtaaaagattacaatcaattgatttaactggtgtaacaaatttacaagatgaaatttattttcaattatcaaaacattgtaagaggttacaaggtttatatgcaccaggttcaatgaatatttcaaaagaagcagtatgtcaattagttttaagttgtccattactgaaaagagttaaattaagtgattgtaatagtattgatgatgaagttataaatttattagttgaaaattgtcaaaatttagttgaattagatattcatggttgtgaaaaaatttcaaataatgcattatttaaaatattttctgaattagataatttaaaagaatttaaaatttctaaaaatcaaaatataaattatgaatgtttagaaaattcatttaatggatcaattttatcattagataaactgagaattttagattttactcaatgttcaaatataactgataaatcaattataaaatttgttaaattagctccaaaattaagaaatgttgttttatcaaaatgttcatcaataactgatttatcattaaaggcaattgcaacattaggaaaaaatttacaatatattcatttaggtcattgtagtaatataactgatattggagctaaagaactgattaaaggttgttatagattacaatatattgatttagcatgttgtaatcaattaacaaatgaaacaattgttgaattatcaaatttaccaaaattaagaagaattggtttagttaaatgtaatcaaataactgatgaaggtataattgcattagctgataatgctaaaaatagtcaagatacacttgaaagaattcatttaagttattgtgttaatttaacaatttatccaatttataaattattaaaggcatgtccaaaattaactcatatttcattaacaggtatttcacaatttttaagacctgatataacacaattttgtagggaaccaccaagtgaatttaatcctcatcaaaaatctatattttgtgttttcagtggtgatggagttaaattattgaaaaatcatttaagtcatataattcaaacaactgaagttgaagatagggaagcaactgaaattttacaaattattaatggtataattggaacaacaacaccaactaatattgaaaattttcaaaatcctcaatcaattgaaagatttaatcattttgttgcaactgcaatggattttttaagtgattataatgatttagcaatttcaattgaaacaattcaattatttgcaagatgtatatttggaggtattcaacaaacacaggcaacaagagttcaaagatttttccaattaatgcatgatagacctgcaagggttagattaagaaatagagctagggataatttaattagacaacaacaagaaattgaacgtcgtagattaaatgaagttaggacgatacctaatggaggaacggtagttaatggaacaggtgttatagttgcaaatgaaataatgagtaataataatggatcaacattagcagtttatgaaggagttgaaggattacctagtaatgttgcagtaattggtagatttgagacaatgagaaataatttaatgggtagaagacgagctgaaattgtacgaatgaatggagggaatggaggtgttgatgttgatgagagtcgacaattagctaatatacctaatgaacctaatagattatttcaaggtgttaatgatgtagaagatgtagaagaagatgatgaaagtatggatgaataaattaagtaattattatataatataggatatatctatttatgtatcaatgaaagaataatataaaataataatggatagtattttatacagctattggataaaacattctaataatataagaggttgtgttattttgtaacatataatctaatcttttaatttcattttcatgtagggttggatctgtaattatatcattatcatcattttggaatttatcatttaaaatttttcttcttgctactaaaatacgtttaattttccattctctaaaaggtaataataataaagcacttataattgcagcaataccaactaataattgacaataaaggaaaggttttgacatttcaggtcttcttaatttaaatccaactaattcagcaattaataaaggtaaaccacccataaacatttgaattgaaattgcatgatttaaatctttcccaccaccacctacaacatctgcagtcattggaccaaaattaacccaattaacaccaaggaaaaatccaataacgaatgcaaatcctaataattgactataagtttcaacgaaaatccaataaaagaaaacgaaaatagttattaaaactgttgctataattgttgtattaactctacctaatttttcagaaataatacctaacattggtctaccaacagtttgagcaacactttgaacaattgtaacatttgaaccttgcttataagataatccaatacttgaagcaaatgaagataatgagaataataaaattgtatatgctaaaccataaaccatattccaaagaactaagacaaaaaattggtacttgtttaataagatctaatcttgttataaattgaattaattcaaggaaaaattcttttaaacctttaccctttaatgaattcatccttaattggacgataagttcttaataaaagaattgaaattaatagaataaatccacaaacaaaggcttccatacgtaaagcccaagcaatacctaattttaaaccttcatgtttattattttcatattttgggatcattaagatataattgaatgattgaatcaataggtcttgaaaaaatgacaccagctaaaccaccaccagcagttgcaataccttgagcaattgaacgtttctttaagaaccatgaaggtaaaataacgaaagttgaacctgcaactaaagcccaaccaattgacattaaaaaaccttgaaacataattaattgaacaacagtttttgaaatagaatgctaaccaataagaaatgaatgtaattatagtaccaattaacattataattttataattaaatcttctacagagaccatttgtaattgcacaaagagcaaatgataaaccaagacctaaaccaccaatcattacataatcttccattgttgcacctgggaaataattagttgtaacataataatttaaataaacaccaaatgaagcattaaccccccaactaaaagtattaatacacataacacaaatagctgcagtccaagcccaaaaacctttatcggggggtttattatcaatatcaaatttattataatgaccatcatctttaacatcagtgggtgtttctttatttgaaatttctggttcctctatttcttcattataattaaaggagggggaaggtacagtttgagatttagcaaatttattatcttcaataatatttgagataattgttgaagttctagtaattatattattgttaataatattaatattaatattattattatttattggtgagggatctagatcttcaattgaagatgatgattctatagaagatgatgaagactccatttagtgtttgatcattgtagaaaagaaagaaataagttgtggaaagtggaaaagtagacagctttaaataaaataaatcatgtagataagaggtcggatatgtgcaaagaataaccgataagcagcggaattactacaattagcagagccgtggaaaatgtgtcaaaaaaattttcactgttagagggaaactagtatatcattacataatcactatttatatactatcttatcatctactcttcatctgactcttcatcatcatcatcatcactctcttcatctgcttcatctaaccatttaaggaatggtcttgcagcttttctaacatttctactttgttccttatctaaatattttttagatacatgagttgcccaatctctaataatttcctctgatacaatatcattatcatataaaatcattaaaatttttggtattgatgtaattaattcaggatatttaataccaattaatctctctataccacctaataatgatttctctaatttttcatttgtaattaattttaataataaacctttatgatttataatttgattaataatttcattattaaaaattgtttgagctaaaacttcaattgatttacgatcttgtgtaattttcaatgtaactaattttttataaatttcaatatcattaggttgagtatttaatatccattcaccaaattcaatatattccttatttgattcatttaaatttaatttctctaattctaatgctcttttcttaattgcttcttcactcatatcaactgaccaatcttcttcaattaatttacttggtgttggtgtagtaatattttcattacttgtactaccattattagatttcttttgtttattagcaatatctgaaattgatttaccacctccaataacattttcacttgcagttttaccttttttggaagattttttatcattttttgaagatggaggatttttcaaaatatatgaaactaatttatatgatggattaacttgagtaattttaccacatgctttacaatctctttgtaaattaccattaccaacaatttctaaaacagtttcaggatttttacattgtaaacataaaacaaatttatcaataaatccatctaaacaatcttgtaattgattaattccatgaacaccattaattaaataacgttcatttttattatcaattgttgtttgagcacctaattcaaaaccaaaatattttaaaacataagttggtggtcttgcaagtgcagttgcaacatcaactaaatttaaaatatttgttttaataccattaccactaccttcagattttgcttgaattaatggcattttataacgataaaatggatcattgtttgatctacaaatattaactaatgacatggttgtataataaggtcgtttgtcttgtaaaataagtaattctttaagaagaagaatgcatattaatgaatctttgaattgaaataaatcatgaaaatggaaaactgaaaaattttaaaaaaaattccctattttgacgatgcgtcgatattttaagtacattctttatacttacatctttctttaaggcaatgaacgatacaattacattacagagacaacttaaggaatcattacaaattcaagaagatgaagaattaaatattgataagattcaaaatattgcatcaaaattaattcatcatcatttatcaaataatagagttagtgcagcacgagccgttattttagtaattgaatcaatttgtcaaccaatgggtcaattatcttatcaatatggtagagtttgtataagggaggggaaatatcagaaagcttatacattattcaataatattggatatattaattggaaaatattggtttatcttttaccattagaatatttaattaataataaattaccaaataatttaatttgggagaaatatccaatactagagccattaaaaccattatttaatgcaattaaatcaaataatgttaaattatttaaatcattaataaattataatgctaaatggttaaataaaattcatttattatcattatacaaacaattaattaatccaattagaattaataatttgaaaaaaattagtatgaattatcctaaacatataataccaattagtatcattgccaatgttaataatgaacctataacttcaactgaatgtcatattagtcaaatgattaatggtggtaaagtacgtggttatatatctcatagtcattgtgttattgtattaagtaagcaatctccatttcaagtgtgatagtcgcgtcggttgggtcgattgcgtcgatttcagttttgttgaaattttcatttcaaatttggctgctttataacagattacaatataatatttactgtatcttatcatatcatatctttgttatctctttagacaaccattggaaatgtttacattagattctaatacaattgaatccttacgtacacttgatatatcattagattcattatcaattaataatataatagataaaaattcaattaatttattaaaatcattatcaacaaaatcaacaagtaatagaatttcaattattttatcaaatccttctaataatgcaaaaattttgaaaaattcacttataaatattgttaataataatgatcaatcaataactaatagtaatttaataattgaatatattttaacaattatttatgatggtatatcaacatcaattaatgattcaattttcactaaatgtatattcaatggaagtgatgatatgattcaacattcattaatttacttattaaattattaacaacaccttcaaatatttcaacattaagtgcacatgcattaataacttataaaattgattttaatggtttaattgatgaatcattattaattaattatattaatttattattagtttcaaatactcaaaatcaatttattggattacaattattaaaagaattattaattaataaatcaattcgtgataaatttactttaaatataagtcaatgatattacattatttaaatcattttataatatattaattaataaatcaattgaattacaaatgaaatatttaataatttatattatttggtgtttatcatttaataaaaattttataaaattaatattaattaatgataatcaatttaatcaattaattccaattttattaaattattcaaatgatgcaattaaggaaaaaattgttagattatcaatttcaactttattaaattttattaatttttcaaataatgataataaattaattaaaaaaatattattatttaatggattagaaattattaaaaatttaaatttaaggaaatggtcagataatgatttaaaggatgatttaattaatttacttgaaattttacaaaattccgtcaatttattaacaaattttgatgaatatgataatgaaattaattcaatgaaattaatttggtcaccttgtcataaaaatttaaatttttggattgataatttatcaaaatttaaggaaaataattttaaaattttaaaaaaattattattattaattgaaagtgatacattaaataatgatgataaatttcaaaatcaatcaattgtttgttatgatatttcaatgttaattaaaactgataattcaatgttagataaaattttacaattaggttttaaaaataaaattatggcattaatgaattcaccaaatgcaaatgttaaatttgaagctttgaaaactttacaattattagtttcaatgagtttataattataatcagtaatcgttatatcattatttatttatatcattattatacatacattgttttctttataaacctaaactatttaatgtttctaaaatatttttatcaatttctaattcatcaaatgatctatcagttgaatatgaaaataatgaattagtccttgatcttaatgtgttattgttattatttatcattgtattcattgaatttataccattcatattattaatgttcatcatactattcacattcatattattattattattcaatcccattatattcatattattataaacatttaaatctgaattacttcttaatctatttgtattaatattattattaatactattaatattaatatttgaattagttataataccacaatcatcagctaatcttttaagagaatttgaattaatttcaattgttaaaagataagattttaatttatttaaaaattgatttttcaaatttggttcaatatgttgtaaatgaattattctatgaataaaatttatacttatatttgaatttgtattagtattagtatttataatttcatttaaattattcataattttatttaataataaatcaattattcttgaatcatttttataatttaataattttaataatgttaaagtacctaatttattattacaaattgtaataaatttattattaattgaatataattcatcattaactaatatataagataaataataatatctatcaattattaaatcacaatctaataaccaattaattaataatgaaccattaatatcaataattaaattaaaactccaagataaaattgcaattataattaataaacaacaatcatttaaaggattatcaatatttggttgataattagtttctaaacaagttctaattgctcttgaaccaaatctattaattgaaattatattaaattttgataataaactttgaaaaattattgtattaaatggataattaaattttaataaaccatgaataacataatttgcataagtatcattaaataataaatgaatataaggtttaattgaattagttattaatttcatttgtcttttattattaattgaattaattaatttttgtgcaacccaagtaccatttttatgaattgaaatttgttgtaaaaatggtgaaattgaattaataattatatctaaagtgaaaggatttgaattttgaattaaatattgaataattgtattacctaaatgatcatttgaaagaattgataattgatttttatcacttaaaagggataaaatttcatttgattgtaaatttgttaatgtattattatcaattttacgttttaaatctcttaaaaaaattgttgaaattgtattagatgatgatgattgaggaggagaacctaaatttgtagaatgagtgaaattaagtgaagaatttaaagttgatttaaatattggtgttatacattcatcacttactataaggttagtaattttattaaaaattggtaatatttgttcaagtggggggagatttggtatattattttgtatattatttgtctgtagttgtggtagtggtggtggagtaataggtaatggaaggttaataggattgatattaagattaatgtttaagatatgaatataacctataatacaattataacctggataaagttgagaattattaagagtagttgcggcattaattgaagaagcaattgatgcaaatctagcaattataacaagatttgaatcagaagatgaaataactgaataaacaccacgtaaagtaccaaaattagccaataaagttgtaaaagcagttgaatttgaaattgttggagaagggggtatatttgaaattagtagagaatctgttggtaaatttgaatgagataatttaattgcagattcaggcaatagatcatgactaattgaggggggtagagtatgagctcttggacgattatactgcattacatagagtaataaagaagaagaagtgtatcctatatagaaacagatgagcctgatttgccactctgttcaaatagtgaggaaattaaaaagctgaaaaacgctgagcatttactgaggggaggttctctattaagtatactacactctttctattggcaatgtacgttcgtcactctggagctcctaaacctattgctggtccattctatcgttatactgctactgcacttggtgcaactatgtggttttggatgttttatagagcaaaacatgattggaaacattgggtaggtatcgaacatccttgggatcatcatcattaattatatacttcctatatagctacttaaataaactcttaaaacgttttattattccattattatcattaccattattattaccattattatgactattacgtctatccctttcaccattactattaatattacctatacctcctctacccgttgaaaatactggacttatagttggtttaatatcttgtgtatcatctatgttactacccttctctttctccttcttattatatatattacccataccacctctacctatactaactgtattactcatttcactaccatgatgtaaaacttcacttgattcttccattacaacttcatttgcttcattaacttcatttttatcttgtgtcatattacccatacctcctctaccggtagatatagttggatgtaatgccattgtatgtagtatattactgatacagaaagaagagataatcataaaataacaatagtaatatcaataatttttattgattttttatattatgtcatgtttttcatgattcaaggcttgtatatagttgtcatatccttataccacacatattatgattaataatgatactatatcaactctaatataccctattaatctcccactaagagattatcaatataatatcctcttaaatacaatccaacaaaatgttttatgtgcaattccaactggtatgggtaaaacttttatttcaacaactcttatattaaattattttaattggacaacttctgatatgaaaattatatttatggcaccaactaaacctttagttactcaacaatttaaatcttttataaaaagtttcaaatattaatataaaattacatagatcttttacttgataaacataaaattaagagattagaaacttataataattcaaataaacgtatttattttgcaacacctcaaataattgataatgatttgaaaaataatttattaaaccctaattcaattatttgtatagtatttgatgaagctcataaatcatcatctccaaattatgcttattcttcaataattaattatatgaataaaaattctaattcacaacataaatttcgtgttttagcattaactgcaactcctggttcaaatctccctaatattcaatcaattattaataatttaaatattgaatcattacaattacgtacacttgaagatgatgatattataaaatatactaatcaacgtgaaattttgaaaattgattgtcctaataatgatgaaattgaagaaatttttaaattacttaatgaaatttcaatacctatattaaaaattgcaaatgatcgtaaaatttatttaaatactgatccaaataaaattaattcatttataatattagaaattcaaaatagaatttccaaggataattcaattccacaacatttaaaatggtcaaattattcaattttgaaaatattatcccttataggtcaattaattaaaagattaacaatttatggtataaataatttctataaataccttaaggaaaaaattaaaacttttaaattgaaaaaatcaaaggataaacaacaaattaatttcttcaatcatcctaatattgataaaattttaaactatattgaatcaaatgaatttgaattccctcatatgaaatttaaagaattatatgataatgttaaagaatttttaaatgaatcaccagaaaattcgaaaattataatatttacagaactgagagattcagcattagaaattgttaaaatattacaatcaataccaaatgcatcacctcatatctttattggacaatctgcatctaaaaataatgattacatcaatgtcgaaaacctgtatcatcaacttctttacgtaaatctaattcatatgaatcatccaaagaaattcatcaaactggtatgaaacaatcaattcaacaatcaattatggataatttccaatcaaataaatataatatattagtttcaacatcaattggtgaggaaggtttagatattggagaagttgatttaattatttgttttgattcaacaagttcatcaattaaaaatattcaaagaatgggtagaacaggtcgtaaacgtaatggtaaagttatatttcttttcagtggtaatgaaaggaataaatttgaaaaatctgttgataattataaatatattcaaaatcatttaatgaataatttaaaaatgattaatttttttgaagtagaaaagggtaataataaaattattgaaccaatgcctaaaattgtatttgagaaattagttatgcccgttgataatgagaatttattaaagaatagtgatttagatgatgatgaatttttaaaattagcatatggagagataaagaatgcagagagaaatgatggtaaaaatgataagagtataagtattttattaaaggagaagaaaagggagaagaaagagaaagaaatgaagagaattgaagaagttaaatcaatgccaggatttcaacctgtttcaagtattaataaagaatttaatattgaattaagtgattcagataatgaatcattggataatcttattgaattcagtagtagtaaaaatagtaatagtaataataataataatcgtagtaaaccaattgatataaatttcagtgattttagtgatgatatatcatttagtgatataattgaaaatgttcaagaaaagaaagtagtaagtaacgataatgaacaagaacaagatgatgaatttgatgatgatgatgaagtacttgaatttttcgataatttagaaccattgaataagaaacataaaccaaattcaaattcaaattcaaatactttgataattacaactgcaagaccagctcaaagataagataacgtaattttttctttactttattaatctactttatattactttctttactaagcaatgtttaatattaatatattcagtagaaatgaacctattgaacttaatgaagatccagtaattgaatctacattaccattatcattccaattatcatattttgaaaaaatttcattatttatagtttgtatacttggttgttatacatgttattcaatttgctttctattcttcccaattttatcattaaagccaagaaaattttcacttatttggaccttaggttcaatattattcttacttgcatttattatacttaatggaatgaataaattcttctctaatgcaataactttggatagattaccatttacaatttcatttattttgtcaattataactacattaatattctcattaatttacaagagtaatatattagttattatatcatgtataatacaattcatctgttcattatactatactatctcttatttcccctacggtagagaaggattaagaatgtcaagtggactggcaagatcacaggtagagagttggttaagttaataagagacttttcgctatgtaagaaaatcgtccatttttattctatttagtattattaattaataacttcttttcttttcttttataaattattttataagacaataataatgccagagaggggacctgatcagtggtttgaagatataaaaaattgtaaagcattacctgaaaatgatatgaaacaattatgtgaaaaagttaaagatttattaatggaagaatcaaatattcaaccagttaaatcaccagttactgtatgtggtgatattcatggacaatttcatgatttattagaattatttaaaatttcaggtggtttcccatcaattacaaattcaaatttaaattatatattcttaggtgattatgttgatagaggttatttctccttggagacattcacaattttaatgatacttaaagttaaatatcctcaaaatataactttagttagaggtaatcatgaaagtagacaaattactcaagtttatggattttatgaggaatgccttaataaatatggttcaacaatggtttggaaatattgttgtcaagttttcgattttttaactttaagtgcaattattgatggtaaaattttatgtattcatggaggtttatcacctgaaattagaatgttagatcaaattagagttttatcaagagctcaagaggtacctcatgaaggtggattttgtgatttagtttggtcagatcctgataatgttgatacttgggcaatttcaccaagaggtgcaggttggttatttggttcaaaagttgctagagaatttaatcatataaataatttaaatttaattgcaagagctcatcaattagttatggaaggttttaaatatcattttactgaaaaggatgttgttacagtttggtcagctccaaattattgttatagatgtggtaatgttgcaagtgttatgaaagttgatgatcatcttaatgttaatttccaaattttcagtgctgtacctgatgatactttaaagataaatccttcaaagaatcaaaagaataataatgaatatttcctataattgataaatgtactaataataataataataataataataatacttacttacttacttataccttaccttcttttcttatgattaatgcttttttcttaattagttccaatgtttgtattttaacttttataacaatataataatatattataataatatatgaaaattatcttatcttatcttatctaataattaaaattatcaccttaccatatagatacacctcctttatccttttaaacaatgacaaatatactacaaaacttcatacaatcatcaattgttgtatttcataacacttccattctgttattcttaattacttacatattcctatggaaatataaattattatggcctttactaatatattacacaattttccattatttccgtgataaatctccagttaatggtaatgtatggtataaaaggaatgaatcttttagaaacttattcatttggaattaccttatagattacttccctattaaatttcataaattatcagatttatcaccaacttttaataataatgaacagaatgaacaaaatgaaagaattggtccaaattacatttttggttatcatccacatggtataattgcaacaggtgtttctaatggatttacaaataatgctaataataattggaataaattatttcctggtattaaatgttttgttacaactttaattaatcaatttcaaatacctttctatagagattatttaatggcattaggtgttacaacagttgttaaaaagaatttaaaaattttacttaataaaggtgcaagtattgtaattgtcattggtggtgctaaagaggcattattagcaaaacctggtaataattcaattatacttaataaaaggaaaggttttattaaattagcattagagagtttaaatgagagtaatgataattttaaatttggtatttcaattgtaccagtttatgcatttggtgaaaataatatttataatgtttattatacaggtgatgatgatgaaaagaataatattggtgataataaatttaaaaaagtagtttataaatttcaaatgtttttaaaggataaatttggttggactttaccaataattgtttcaagaggtatctttaattatgattttggtattttaccttataaaactccaattaatgtagttttcggtaatccaattcatattaaaagattaaataatttaaaatttggtgatccaataactcaatttgaaattgattattggcataatcagtatattattgaattggaaaatgtttgggaatttggtaaggataaatttaggaaaccaaatgaatcaaatttgaaaattgttgaataatatagtactctcatcattccacaatttgtaatggttcatcccattcagttgcaaatgatttattcctttcccataattcaattaatctatccttatataatttatgataaaattcaatttcttcattagttaccttatcaccaactttatttccaaatttcctataaatataaataggttccccaaatacaatatcaattttacgtctatatggtaataatccaaaatcataattaaaaattgatctactattaactaatggtaatgtaaatcctgtaaatttttttaaaattaattgaaatttaaggaaaaatctaagtatccttgattgtttggatttaattgaatgttcagtagtattataaacattatgaatattgttctctccatatacataaacaggtacaattgcaatatcactcattaatttttcatcccatttaccattttgaatattatcattaataatattatcatcatcatcattatccttccagttcctctaaattacatgattctaatgcaattttaataaaacctttacgtttatttaatacaattttattcataccaggtttagctaataatgattcatgagcaccaccgacaacaattgcaactgaatgccatttttgtaaaattgataaaatacttttctttgtaactaatccaactcctaaactcattatataatctctataaaatggtaaaattaattgatgctgataatgtaagtaaatgacatggtataccattaaataatgatttaaaagattttgatgattttaatttaccagtttgaaaaattttatcaattccattccaacataataaacctgttataccaaatgaaataactccatgtggatgacatacaaacatatatcttggaccaatatgttcctcataattaacaattctttccctttcattaattattcttaatatttttaataattttttaactgatttaggtaaaaattttgtccattctggtaaacattttaattttttcgaaattattttaatacttggtggtaatttaattgttctatgagttataattgggaaataatcaataaatcctttataaataaataaatttttaattttaaatgattctctaaaaattgaatcacctgtaattgttgtattatctaataaatatgaataaataacataaataattaaaattggccataatttaatttttgtccataaataaaaatataaacttggtaataaaataattgaactactatgaattaatgtacaaaatgtttcaattcttttatgaattggtgtatttattggactaaaattattattatttggtaaataatctggatattttgatgaattgatattattcatatgaatataatcttgtaaacttaaagtaattgataaaataataaataactaataagaataaaatttaaatcaaatttcaaatcgattctttaattgtttgtttattaaaaagaagcaacataatttaaaaaattaactgcgcaagccaggaatcgaaccaggggctcaacgatggcaacgttgaattttaccactaaaccacttgcgcttgttatgttcttgtaagtaatatgaagcttattagtgatataaagtgaatatctatattataatcaatagagacattacaagtggtatagtctgaaggatagactttaataataatgataatcaaagagattaatggaaataagatttaatgaagaaatatgatgaataatttaataaaccaatgttgacagaaaatcaacggttatgaaaaatgatgggataggatcattaattaatttattatatacaacttctccactaattgatttagtcacattatattacaactaagaactgaataatagattccccacatggagaatcgggctggcttgtgagataattaattacagttctttaaagtatataaataacatgtataagctctcttgagcgggacatctcaatatatgagagttggttttagatagaacaagttttggataacttattatctaactttatcttaactaactactcgcataccagttccatcgacagtattcgcatagtagtattaagtacaattagttacagttattattctttattgtattgaaaagattcaacataagtattaattatttgattacgtaatattttacgtacactatctacaatatcctcctaatactttacatggtagcaccgttaggtcaatacaattgaagaatattattaaaaaatttaacaagtacaatggttagagccagaaaaaatattcatcaaactgaaactccaacagttgaaccgtctgaggaaccagttgtctcagattttccagaagttaaaatgattccatataatcatattaataagttctatggtaatccaaatgaacgtgatgagttcgttgatgcagcaaaacttaaacaaactgcacaggaatggttgtcaacattcaaagaaattatgatgatgaatagaattccaactgatttaagaattcactatgtgagaataggccttaaaggatctgctcatttatggttatcaagtatagattctgaagatgatagtttaaactggaacgaatttgaaaaattatttaataaagaatattgtaatacttcaattgcaaataggcaaaataattattctatatgtcaattacaattttcttctgatgatactgttcctaaatttaatgctgaatttgaaagattgttgttgaacagagaaactccattaaaaccagactttgtcatggatttatatttaataaaattaccatcttacatcagagaacaaattgaaaatgcaccatactcaaattatcatgaacttaaacaagccgctgagcgtgttgaaaaaacttcaaacttcaaacaatctcgtttcaaacaaaatccacatttaaattctaataattattatcacaatcgtgaatatactgctgaaaattatcaagaagatagttcccatgataacaatcatcaaaaggtcagaagacttaatgatcagaaatgaaaattcttaaccggttaaaatcctatattcagaggcaaattaaaataattatgctaatttaataacttgaatcatgattaatatgcttatattataaattataatttttttttactagctaaagctaaggcatacattaacaggttgatatcctataattttccattgctttgtgaaataaaatgaaaccattagagagacttaagattttttatcttttggaaattgttttaaaaacttatcgtgataaactttcaatagaagaatcaataggaactgcagagcaacgtgcatccgcatcttccgaagtaagtataactcaatttagacacgatgaagggtatattataacctttactaacctcaaatatgattacctctttggttaattcactgcaatgagaattcaaatctaactttgaatttagacttactcaactatatttatctggtacataccaccataccaaggctgataaaaaggctaaaaggcaaatagttgaagatcatgataagaaattgccattcaatccctgaattagagacatatgaaaatttattgtatgttaaattacgatcaatattattctttgatgttgttaaaaatgatacctactgatttacttctagaaagaagatatactcataaaatccaattattaattaatatactttattaggatttagtttaaattaatttaacaaatgttattacagtagaggagttagagtttatgatttaaggaaattagaagaaagtataatacttcatatatgactgagaatttacggctcttatatctcttacatggaaatattaccaagatcttatttaattaatacaatatgattttgagattcaatacgtgtcagatcgtatgaatttttatgaattttgcagtaaagacacattatagtgttaatctgattacaaattgattatactaaataaattttgaatcaatattatcaaattacaacaattatatcacaaagtgaacatcgagacgatgtttcccgagacgggaggatgtaagtaatatgaagcttattagtgatataaagtgaatatctatattataatcaatagagacattacaagtggtatagtctgaaggatagactttaataataatgataatcaaagagattaatggaaataagatttaatgaagaaatatgatgaataatttaataaaccaatgttgacagaaaatcaacggttatgaaaaatgatgggataggatcattaattaatttattatatacaacttctccactaattgatttagtcacattatattacaactaagaactgaataatagattccccacatggagaatcgggctggcttgtgagataattaattacagttctttaaagtatataaataacatgtataagctctcttgagcgggacatctcaatatatgagagttggttttagatagaacaagttttggataacttattatctaactttatcttaactaactactcgcataccagttccatcgacagtattcgcatagtagtattaagtacaattagttacagttattattctttattgtattgaaaagattcaacataagtattaattatttgattacgtaatattttacgtacactatctacaatatcctcctaatactttacagttctctcggtttcttgttttttacacatttttgtttttctgattacgtaagcagtgtatttattggcgttttttgctactaataatttgggtaaaatagtaaacaaagtgttgggttcagtgtaatattttaatataataatctaatgatattattggtgttttaaaatacaattaaaatcaataaatacatggctggaagtaaatgataccgtttttaccggctctgtgcttgaatatttacgtgtattatcatttaaaaaggttgtaaatattacagtacactataaaaacaaagtgtttattttgtattaatctatcattaagttaagtgcaatgaagtttattaacaaacaaaatgatgggaaacattaaaaaaaaaattccattcgctaatttaacaaataaacttaaaaagtaaacgtcagctacaggattcgaacctgtgcgggcagagcccaaaagatttcaagtctttctccttaaccactcggacaaactgacacttgatgctaaaaacctactcctctattccttgatatcttttacctatattacgtaagcaataaatagttaagtatttttgatgttatatttcctaaaagaaagccctgtgatatcagtaaatgttgaacggtaacggctctagtatagatatccatagttagttacttcaaggttataaaaagaaataataatatataagttataataaagaaaaacaataagtaagttaaagaacagtaaagagtaagtggaaacttctctttatatagacaaatttatgtctaagataattggtgttttgattaataatcaaatgtttcatgtttgtatttgtcatcatatgaggcattagtaatcataagtattactaatatcatatggtctagtcttttctataaatagatgaaacatagatgaaacacatctatttagagtaacaatgaaacatttgtatctcaacagtaaaaataaaagatatatttatcactgctttttgtgtaaaaagatatgatcataacatgatgcaaaaattgatccctagcaggatcgaactgctgatcttggcgttattagcaccacgccttaaccaactgggccaagggatcttattgttgtgttgaaagtaaaaaataaaaaaaataaaaaataaaaaataaaaatgctgcaatcggttgcggccatatctagcagaaagcaccgtttcccgtccgatcaactgtagttaagctgctaagagcctgaccgagtagtgtagtgggagaccatatgcgaaactcaggtgctgcaatcatccacccatcaaaaataaccgtcagatactcggaaatgttcagagagcaacacagacaacaacattttgatgaacgaaatcaacaagaagcctggtaccttgatcataacatcattcctccatcactaggaccatacccaccaccagctcacacctccctcagcagtgacataattctaccagtaaatatatctcctgaaacacccatctaccatcctctccaaacctacctaacagcatggaggaatacagttacactaccaaatcttccagctgaagattcggaaatgactgatcacatcacctgcaacaccatcaaccaacctcaaaccataacctcatacaacaatatcctacaaaccaaattgcagaatcaatttttgaataaaaataaatcccagcaaccttcaaatattctttatcaggacttgaatcatctatcttccaaactccaccaaaacatcaactatatcaacaccaatactaaaacttgggccaacaatgcacagcttggtgaccaagaatggaaaaacttctttaacaacatcaatcaacatatcttcaccaaaccccaagattactactacctatatgcacttaacaccggattactaaacaatacattttacagtagctgtctatgtggccttccattcaacgggacgccaattagacatgttattaatgaatgcaacatcaccacccacatattcaaatttatcaaaaaccaatcaaatcaacaacatactctacaattctccacaactattttaatttgtccgcaaaaaccacaaacgtcgtcatttacatttataaacactttcattaaatttcttgtctattgtcatagggtagcttatgccaagagacctgaaatattacaatgggaaaatgagaatattatagaagatacttactgggatttcaaataccggtaaggcttccatcttattcttggtttccaacacttcacaataatcacacaaaacttataaacaatttaaccattatttacatttctttatcagttcatttactctttaagttctttttcatctttcatttaattttacaatataacaaaagggttttataggattatcctttcccttaaccggactgaatgttttattatatagcatttattttagagaaaaatatttatagtatcttttataaatttatagtaatacagaagttgactggaaaaaaaaaaaaaaaatttatcctctttcttaaaagaattagaaagaaatattaatactacaaatttagcagaaatgcacaaagagtttcaatttatctttgaagattatcacaaaagcaaagataacaacaacaataatactattaaaaataaaaaaatcaacaaagttcataataatatgagcaaaccaattgatgcaccaactgagaatacaatggaagaaggcgcaaacatgtttaatactgataaatacagtttaaaaattaacctaccattggctgaaccaccgatggaattattacaattagtttctaccatgttagtagaaacatttaattcatatgatcttaacttaatggatcaatcttttgaagaaaacaacacacttgttgttttaaaaacggagttccctcctttcatcattaaatctaaatatgatgaaattattaaaaatctctattcagaatacggagaaattatgtcttgtcaattaccacaagaaaaagaatccaaaatggcattcaatatgaagttctacgaacaaaataaaattatttacacagtgttaaaactaaaatcatcagttttaccacctaaaattcattccatctcacacacaacaggtggaaaaacacataaaatccccatcatcacttacttgtctactgcacctacacattgtgtatactgcagatgtacagaccacactacagctagatgtccaatgaaaccaagttgtagaagatgttacaaccctagacataaggtcaaagaaggtgaaattccaaagaatggtcacagagaaattttctgtccaaaatcatcggaggctgaacaagaaaggttatttaattccctccacccaaaaacaagagagaatttcttcaaaaaaactctctcaagatcattaccactgtgggcattgagaattagaaacgcaacggttaatgatcaagtattttacgctcctgttactccaagaacatcaactacaaatggtaatgggaaaagaagtagagcccaaacctctacaaacattttaaatctagatgcagctgttgttatcaataatgacaaagtagattcagatggcttctctattccatctaaacctaagaacttatctaggtcagattcatcatcatcaatagtcagtaacgttgataatgcggtcaatcctttccaagtattggaaaatgtggatgatccagaaattccaaatgaagatgaaaacatccatagtgatgaagagatagaagatatggttgttgaaactaagcatgccgaaactacaagaagtatgccaaaaactccaactcaacctagaaatgtcagaacattagttaaatcttctaaacaaggtaagagtgtagcaactggtacattattagatgctaaaaaaatagaaatggcattagaaagaaaagagaaacttgaaaaaaagaaatctcaaatggatttagactcacaagtctaattcatttaattcttcaagtttaataaaatataaaaatataaaaattaaaaaaaaaaatataaaatatcataatgaataagttaaaaattttaaattttaatattcagaaggcaactagtccttctaaattaattcatattctaaattatgcaaaaaataaaaaaattcaaattatgtgtcttacagaatttgatctaaatcaatcaactgaattatcttcaattcaacaattattatccaatttcgatttcaaaattgcgattcaatctgttcaacatcgaacagcaattatttaccattcttcaatagaaatcatttcaaataatatttttccaaggcataatcgtgataatcaacttgcaaacttttatgtctgtgatataacaataaatttcaaacaagaaaacttaactatcatctctgtttatgtaccagtttacaataatgttaatgataacagattccactgcattaacaaaaaagattttattgacacattatgtccaactttatcatcattatctcgtggtgaaaataatctaatcatttgtggtgattggaatacacatcctatggaagcaacaaatttaaatcgtattgaatcatttcttcatcaacaattaatggaaaataatttatatgatattttcttccttccaaataatagaaaaagtatatgttacaccaaccacggttcaaatggaacaaataatcggctagaccgtttccatgtttccttcaatctgctaagaaatatcaattttaaatatagagtacatcaaaagctcccgtttacaacacatagaccggtagtatgtacattatcagatatcaattcaaattctaataataatataattaataaagataatttctacaaaagaataccatcaattcctgattacattattgaaaataaacaattatataaatacattttcaccaatgagattctggatactaaaaacccatcaatggattataatgcatatatgcaaagagtttgctggaaaacaaataaagtaattcagataatgaaacatttaccttcatataaggaaaaaatatcatctaacgaattaggatttgattttaatgatcctcaattcaataatatctcagctaatctctcaaaaaacttcaagagacttagacttagatttggaaaacattcaaatgaagcaaatttggatgaaaatattataaatgatgcaaattcattttattcaaatcttttcgcatcaaatgaaatttattcaaatcaaaatttaaataacaaatttgacaagttcactgaaaatattaaagaacaattaactgagaaagagaaaaatgatttaattaaacctttttcaaaacaagagatatataaaaaccttctaaggctaaatgaaaatggtccatcatcaccagggactgatggtattacttacagagattggaaaaacaactgggtttctgctgctgtgattctaaccaacatggcaaattatattcttcaaggcaatttaaccacaactgataagattggtaaagtattgataaaattaattcccaaaaagagttaccgacaagatcttccattaatagatgatctacgtcctatcagtcttacaaattcatcacttagattaatcaacttttctatttctaatagaataatgcctattgcaaacaggattatttcccatcatcaacaagcatttatgcttcacagaaatattcatttacatattgaaactgcaaggattcttgctaatcaaatcaattcatcaccatcattatccaatgaacaacatatattattagtagacttgaaaaaagctttcgattctattgatcatcaatatcttaaaaagatcttagaaaaatttgggttccctaattcaactattgaagcaactattaaccaatctaggttagcatcggctaatatagttaatcaaaattggatccataaatttaatattccattaaggagaggtgtaagacaaggtttacctttctcacccctgatattcaatcttgcaatacaaccactgattattaaactccatcaatcaattagaggaatgaaatacaatccatacaatgagagaggtttaaatgctaagctttttatcaatattctagcttttgctgatgatatatgtctgtttcaccagaacaataatgaactattaaaatcactatcaattttaaataattttgctcaaatttcggatcttaaaataaatgaaaagaaatcaataatttttattaataataaaggtatcaataatatcaaacaatttgctaatataaatcaattgaagctatcaattttagatatcaaagaaaatcctatctatctaggaattcccttgttgaaaatcaactggtacaataaaataaaccaattgaaaacaagactaaggaaaactatgtttttagatctaaatttatatcaaagagtagtagctgttaatacttacatttattccactatctattattttgatcaacatgatccaattccggatcctcttttaaattcttttgaaaattatgttaaaaaagaattagttaaatatttaccgctgaaaattgcagttagaagaatcaaatggcatcaacctcacaaaaatgggggtatgggtctgatcgaccttggtaaacaacttcaaggtagaagagcatatttcatttatataacgactattaaacagaagttaaaatttataaatgaacatcctttgacattaataatctcacactcattacaaggaattattaatgttatgatcagaaatcactacgtttatcattgttattacaaatatgtggaaaattacatactatcaaatagagctgtacctggaactttaccaaaaataaaaataccaggcactatttcaaatgaattgatttcaacatatccgttcagtcttcttctgcataaaaatcataaaatatggggaagtaatattactattgaagaaactctttcaaatgaaatgtcaaaggttgcaaaacctaaaataataaatgtaaatacagggaaaataataatcgatcttgaaccaaatatcaatttcattatcgaacaccctgtgaattacaacatggatgaagcttcttcaaaaacattagcaccattaatggtgtactctaatattttcccatatttacaaggatggtattatttaactaatattcactcagattttcaggttaaagaaactacagatttcaatgcaacatcgttattttcaatggtagaaaaaaatgttcaaaaatggaaaattgtagaaattttcaataaaaatcaggaaatcaatgttgaatcatttaaacatttttctaaaagattttacaaagaagaatttaaaaataaatttaatgctgattattgggatggtaaactagaccatcaactggattgggaaacatgctttggttggttgggtagaatcaccaatcaaaaccatgttgattttaatgaattatttgaactacaaacaggaatgttgaattcccatttttatcacccttgccaattctgcgaaggggaaggtgggactcatcatgtctttttcaactgtaaaggaattgaaataattctaaaagaattagaaataaaaattgatctaaaaaatattgttggtttaatatcaacaaagaaagatgcttataaagcaaatataataatcaagttaattatattttttaacaaacaatgctacaaaagcaataagaatgatccagagtttaggataacaaaaagatatattaaagatacatatttgctattcaaatatgaaaaatttagttcttattagatctaaattagatgaaaaagattgagaataatcaaacagaaataatttacatttagttcagtatatgaagatatattgaattgatgaagcattaataatatatgcgtataagtaatcaatctgtataaaattgtatattttaatgaaattaatgtaaaaaaaaaaaaaaaaattaaaaaaaaaaatgattgaaaaaggggccctaaaagctactacaatcgacgattcaggtcctcccgaccctccaaacgttactaaaccgcccaactttgttgtaatctaataactctagatgcagggtccattttatgacaacagtaaaagttatttaaaggaactaaataaaatataaatgaataaattaaatacaaaactaactaaagaacttcttaaaaggaacgttactaaaccttggaattcttcgttgtatttatactaagaattccaatctttactatcgtttctttttctaatttgtaacgtttctttttaggatttataacgtttctttttctgatttgcgaacaatacttgactctaaccagtttttaaggctcaacttaataatacaatattattatgtattgttgagtttcgcttagaattaccgatctcaacaaacttaccccatggtgagtccaacaagttaacttcaatctttgctgaagaaaaagaaaacgaaggtttgaatcaaactgaccatgaaactcaagatgaagatgaagatattgagtttcaagattgcgctgaggaagatgaagtagtccaagaggtaaatgcagaaccttaaccaaccatgacgttggctcaaaaactccataaaacaattacggaggcaaatattacggttgataaagatcatctttatcacctttcatactttctaaaagttggcaaagatcaatttttagaccttgaaaaattacaagaaattttatcctctttcttaaaagaattagaaagaaatattaatactacaaatttagcagaaatgcacaaagagtttcaatttatctttgaagattattacaaaagcaaagataacaacaacaataatattattaaaaataaaaaaatcaacaaagctcataataatatgagcaaaccaattgatgcaccaactgagaatacaatggaagaaggtgcaaacatgtttaatactgataaatacagtttaaaaattaacctaccattggctgaaccaccgatggaattattacaattagtttctaccatgtagtagaaacatttaattcatatgatcttaacttaatggatcaatcttttgaagaaaacaacacacttgttgttttaaaaacggagttccctcctttcatcattaaatctaaatatgatgaaattattaaaaatctctattcagaatacggagaaattatgtcttgtcaattaccacaagaaaaagaatccaaaatggcattcaatatgaagttctacgaacaaaataaaattatttacacagtgttaaaactaaaatcatcagttttaccacctaaaattcattccatctcacacacaacaggtggaaaaacacataaaatccccatcatcacttacttgtctactgcacctacacattgtgtatactgcagatgtacagaccacactacagctagatgtccaatgaaaccaagttgtagaagatgttacaaccctagacataaggtcaaagaaggtgaaattccaaagaatggtcacagagaaattttctgtccaaaatcatcggaggctgaacaagaaaggttatttaattccctccacccaaaaacaagagagaatttcttcaaaaaaactctctcaagatcattaccactgtgggcattgagaattagaaacgcaacggttaatgatcaagtattttacgctcctgttactccaagaacatcaactacaaatggtaatgggaaaagaagtagagcccaaacctctacaaacattttaaatctagatgcagctgttgttatcaataatgacaaagtagattcagatggcttctctattccatctaaacctaagaacttatctaggtcagattcatcatcatcaatagtcagtaacgttgataatgcggtcaatcctttccaagtattggaaaatgtggatgatccagaaattccaaatgaagatgaaaacatccatagtgatgaagagatagaagatatggttattgaaactaagcatgccgaaactacaagaagtatgccaaaaactccaactcaacctagaaatgtcagaacattagttaaatcttctaaacaaggtaagagtgtagcaactggtacattattagatgctaaaaaaatagaaatggcattagaaagaaaagagaaacttgaaaaaaagaaatctcaaatggatttagactcacaagtctaattcatttaattcttcaaatttaataaaatataaaaatataaaaaaaaaaaaaatataaaatatcataatgaataagttaaaaattttaaattttaatattcagaaggcaactagtccttctaaattaattcatattctaaattatgcaaaaaataaaaaaattcaaattatgtgtcttacagaatttgatctaaatcaatcaactgaattatcttcaattcaacaattattatccaatttcgatttcaaaattgcgattcaatctgttcaacatcgaacagcaattatttaccattcttcaatagaaatcatttcaaataatatttttccaaggcataatcgtgataatcaacttgcaaacttttatgtctgtgatataacaataaatttcaaacaagaaaacttaactatcatctctgtttatgtaccagtttacaataatgttaatgataacagattccactgcattaacaaaaaagattttattgacacattatgtccaactttatcatcattatctcgtggtgaaaataatctaatcatttgtggtgattggaatacacatcctatggaagcaacaaatttaaatcgtattgaatcatttcttcatcaacaattaatggaaaataatttatatgatattttcttccttccaaataatagaaaaagtatatgttacaccaaccacggttcaaatggaacaaataatcggctagaccgtttccatgtttccttcaatctgctaagaaatatcaattttaaatatagagtacatcaaaagctcccgtttacaacacatagaccggtagtatgtacattatcagatatcaattcaaattctaataataatataattaataaagataatttctacaaaagaataccatcaattcctgattacattattgaaaataaacaattatataaatacattttcaccaatgagattctggatactaaaaacccatcaatggattataatgcatatatgcaaagagtttgctggaaaacaaataaagtaattcagataatgaaacatttaccttcatataaggaaaaaatatcatctaacgaattaggatttgattttaatgatcctcaattcaataatatctcagctaatctctcaaaaaacttcaagagacttagacttagatttggaaaacattcaaatgaagcaaatttggatgaaaatattataaatgatgcaaattcattttattcaaatcttttcgcatcaaatgaaatttattcaaatcaaaatttaaataacaaatttgacaagttcactgaaaatattaaagaacaattaactgagaaagagaaaaatgatttaattaaacctttttcaaaacaagagatatataaaaaccttctaaggctaaatgaaaatggtccatcatcaccagggactgatggtattacttacagagattggaaaaacaactgggtttctgctgctgtgattctaaccaacatggcaaattatattcttcaaggcaatttaaccacaactgataagattggtaaagtattgataaaattaattcccaaaaagagttaccgacaagatcttccattaatagatgatctacgtcctatcagtcttacaaattcatcacttagattaatcaacttttctatttctaatagaataatgcctattgcaaacaggattatttcccatcatcaacaagcatttatgcttcacagaaatattcatttacatattgaaactgcaaggattcttgctaatcaaatcaattcatcaccatcattatccaatgaacaacatatattattagtagacttgaaaaaagctttcgattctattgatcatcaatatcttaaaaagatcttagaaaaatttgggttccctaattcaactattgaagcaactattaaccaatctaggttagcatcggctaatatagttaatcaaaattggatccataaatttaatattccattaaggagaggtgtaagacaaggtttacctttctcacccctgatattcaatcttgcaatacaaccactgattattaaactccatcaatcaattagaggaatgaaatacaatccatacaatgagagaggtttaaatgctaagctttttatcaatattctagcttttgctgatgatatatgtctgtttcaccagaacaataatgaactattaaaatcactatcaattttaaataattttgctcaaatttcggatcttaaaataaatgaaaagaaatcaataatttttattaataataaaggtatcaataatatcaaacaatttgctaatataaatcaattgaagctatcaattttagatatcaaagaaaatcctatctatctaggaattcccttgttgaaaatcaactggtacaataaaataaaccaattgaaaacaagactaaggaaaactatgtttttagatctaaatttatatcaaagagtagtagctgttaatacttacatttattccactatctattattttgatcaacatgatccaattccggatcctcttttaaattcttttgaaaattatgttaaaaaagaattagttaaatatttaccgctgaaaattgcagttagaagaatcaaatggcatcaacctcacaaaaatgggggtatgggtctgatcgaccttggtaaacaacttcaaggtagaagagcatatttcatttatataacgactattaaacagaagttaaaatttataaatgaacatcctttgacattaataatctcacactcattacaaggaattattaatgttatgatcagaaatcactacgtttatcattgttattacaaatatgtggaaaattacatactatcaaatagagctgtacctggaactttaccaaaaataaaaataccaggcactatttcaaatgaattgatttcaacatatccgttcagtcttcttctgcataaaaatcataaaatatggggaagtaatattactattgaagaaactctttcaaatgaaatgtcaaaggttgcaaaacctaaaataataaatgtaaatacagggaaaataataatcgatcttgaaccaaatatcaatttcattatcgaacaccctgtgaattacaacatggatgaagcttcttcaaaaacattagcaccattaatggtgtactctaatattttcccatatttacaaggatggtattatttaactaatattcactcagattttcaggttaaagaaactacagatttcaatgcaacatcgttattttcaatggtagaaaaaaatgttcaaaaatggaaaattgtagaaattttcaataaaaatcaggaaatcaatgttgaatcatttaaacatttttctaaaagattttacaaagaagaatttaaaaataaatttaatgctgattattgggatggtaaactagaccatcaactggattgggaaacatgctttggttggttgggtagaatcaccaatcaaaaccatgttgattttaatgaattatttgaactacaaacaggaatgttgaattcccatttttatcacccttgccaattctgcgaaggggaaggtgggactcatcatgtctttttcaactgtaaaggaattgaaataattctaaaagaattagaaataaaaattgatctaaaaaatattgttggtttaatatcaacaaagaaagatgcttataaagcaaatataataatcaagttaattatattttttaacaaacaatgctacaaaagcaataagaatgatccagagtttaggataacaaaaagatatattaaagatacatatttgctattcaaatatgaaaaatttagttcttattagatctaaattagatgaaaaagattgagaataatcaaacagaaataatttacatttagttcagtatatgaagatatattgaattgatgaagcattaataatatatgcgtataagtaatcaatctgtataaaattgtatattttaatgaaattaatgtaaaaaaaaaaaaaaaaattaaaaaaaaaaatgattgaaaaaggggccctaaaagctactacaatcgacgattcaggtcctcccgaccctccaaacgttactaaaccgcccaactttgttgtaatctaataactctagatgcagggtccattttatgacaacagtaaaagttatttaaaggaactaaataaaatataaatgaataaattaaatacaaaactaactaaagaacttcttaaaaggaacgttactaaaccttggaattcttcgttgtatttatactaagaattccaatctttactatcgtttctttttctaatttgtaacgtttctttttaggatttataacgtttctttttctgatttgcgaacaatacttgactctaaccagtttttaaggctcaacttaataatacaatattattatgtattgttgagtttcgcttagaattaccgatctcaacaaacttaccccatggtgagtccaacaagttaacttcaatctttgctgaagaaaaagaaaacgaaggtttgaatcaaactgaccatgaaactcaagatgaagatgaagatattgagtttcaagattgcgctgaggaagatgaagtagtccaagaggtaaatgcagaaccttaaccaaccatgacgttggctcaaaaactccataaaacaattacggaggcaaatattacggttgataaagatcatctttatcacctttcatactttctaaaagttggcaaagatcaatttttagaccttgaaaaattacaagaaattttatcctctttcttaaaagaattagaaagaaatattaatactacaaatttagcagaaatgcacaaagagtttcaatttatctttgaagattattacaaaagcaaagataacaacaacaataatattattaaaaataaaaaaatcaacaaagctcataataatatgagcaaaccaattgatgcaccaactgagaatacaatggaagaaggtgcaaacatgtttaatactgataaatacagtttaaaaattaacctaccattggctgaaccaccgatggaattattacaattagtttctaccatgtagtagaaacatttaattcatatgatcttaacttaatggatcaatcttttgaagaaaacaacacacttgttgttttaaaaacggagttccctcctttcatcattaaatctaaatatgatgaaattattaaaaatctctattcagaatacggagaaattatgtcttgtcaattaccacaagaaaaagaatccaaaatggcattcaatatgaagttctacgaacaaaataaaattatttacacagtgttaaaactaaaatcatcagttttaccacctaaaattcattccatctcacacacaacaggtggaaaaacacataaaatccccatcatcacttacttgtctactgcacctacacattgtgtatactgcagatgtacagaccacactacagctagatgtccaatgaaaccaagttgtagaagatgttacaaccctagacataaggtcaaagaaggtgaaattccaaagaatggtcacagagaaattttctgtccaaaatcatcggaggctgaacaagaaaggttatttaattccctccacccaaaaacaagagagaatttcttcaaaaaaactctctcaagatcattaccactgtgggcattgagaattagaaacgcaacggttaatgatcaagtattttacgctcctgttactccaagaacatcaactacaaatggtaatgggaaaagaagtagagcccaaacctctacaaacattttaaatctagatgcagctgttgttatcaataatgacaaagtagattcagatggcttctctattccatctaaacctaagaacttatctaggtcagattcatcatcatcaatagtcagtaacgttgataatgcggtcaatcctttccaagtattggaaaatgtggatgatccagaaattccaaatgaagatgaaaacatccatagtgatgaagagatagaagatatggttattgaaactaagcatgccgaaactacaagaagtatgccaaaaactccaactcaacctagaaatgtcagaacattagttaaatcttctaaacaaggtaagagtgtagcaactggtacattattagatgctaaaaaaatagaaatggcattagaaagaaaagagaaacttgaaaaaaagaaatctcaaatggatttagactcacaagtctaattcatttaattcttcaaatttaataaaatataaaaatataaaaaaaaaaaaaatataaaatatcataatgaataagttaaaaattttaaattttaatattcagaaggcaactagtccttctaaattaattcatattctaaattatgcaaaaaataaaaaaattcaaattatgtgtcttacagaatttgatctaaatcaatcaactgaattatcttcaattcaacaattattatccaatttcgatttcaaaattgcgattcaatctgttcaacatcgaacagcaattatttaccattcttcaatagaaatcatttcaaataatatttttccaaggcataatcgtgataatcaacttgcaaacttttatgtctgtgatataacaataaatttcaaacaagaaaacttaactatcatctctgtttatgtaccagtttacaataatgttaatgataacagattccactgcattaacaaaaaagattttattgacacattatgtccaactttatcatcattatctcgtggtgaaaataatctaatcatttgtggtgattggaatacacatcctatggaagcaacaaatttaaatcgtattgaatcatttcttcatcaacaattaatggaaaataatttatatgatattttcttccttccaaataatagaaaaagtatatgttacaccaaccacggttcaaatggaacaaataatcggctagaccgtttccatgtttccttcaatctgctaagaaatatcaattttaaatatagagtacatcaaaagctcccgtttacaacacatagaccggtagtatgtacattatcagatatcaattcaaattctaataataatataattaataaagataatttctacaaaagaataccatcaattcctgattacattattgaaaataaacaattatataaatacattttcaccaatgagattctggatactaaaaacccatcaatggattataatgcatatatgcaaagagtttgctggaaaacaaataaagtaattcagataatgaaacatttaccttcatataaggaaaaaatatcatctaacgaattaggatttgattttaatgatcctcaattcaataatatctcagctaatctctcaaaaaacttcaagagacttagacttagatttggaaaacattcaaatgaagcaaatttggatgaaaatattataaatgatgcaaattcattttattcaaatcttttcgcatcaaatgaaatttattcaaatcaaaatttaaataacaaatttgacaagttcactgaaaatattaaagaacaattaactgagaaagagaaaaatgatttaattaaacctttttcaaaacaagagatatataaaaaccttctaaggctaaatgaaaatggtccatcatcaccagggactgatggtattacttacagagattggaaaaacaactgggtttctgctgctgtgattctaaccaacatggcaaattatattcttcaaggcaatttaaccacaactgataagattggtaaagtattgataaaattaattcccaaaaagagttaccgacaagatcttccattaatagatgatctacgtcctatcagtcttacaaattcatcacttagattaatcaacttttctatttctaatagaataatgcctattgcaaacaggattatttcccatcatcaacaagcatttatgcttcacagaaatattcatttacatattgaaactgcaaggattcttgctaatcaaatcaattcatcaccatcattatccaatgaacaacatatattattagtagacttgaaaaaagctttcgattctattgatcatcaatatcttaaaaagatcttagaaaaatttgggttccctaattcaactattgaagcaactattaaccaatctaggttagcatcggctaatatagttaatcaaaattggatccataaatttaatattccattaaggagaggtgtaagacaaggtttacctttctcacccctgatattcaatcttgcaatacaaccactgattattaaactccatcaatcaattagaggaatgaaatacaatccatacaatgagagaggtttaaatgctaagctttttatcaatattctagcttttgctgatgatatatgtctgtttcaccagaacaataatgaactattaaaatcactatcaattttaaataattttgctcaaatttcggatcttaaaataaatgaaaagaaatcaataatttttattaataataaaggtatcaataatatcaaacaatttgctaatataaatcaattgaagctatcaattttagatatcaaagaaaatcctatctatctaggaattcccttgttgaaaatcaactggtacaataaaataaaccaattgaaaacaagactaaggaaaactatgtttttagatctaaatttatatcaaagagtgttgagatattaatctaaactaggattcgaacccgttactataagaatcaaaacctttagaagaagaaaccctcaacaagaatttgaaaccctcaccataagaagagaaaccctcatcaagaagttaaaaccctcaccttgaaaaatgaagtttttcaaagtgaaaatcttattatataaaggaacatgtttcccacttttataattttttatttcctcttattttctttatattatttattttacttttgtttatcttatttaaacaacaatacaaactatattttaacttgcttattaaaatggattttgctaatagaattacccttatacaacaaagagtagtagctgttaatacttacatttattccactatctattattttgatcaacatgatccaattccggatcctcttttaagttcttttgaaaatcatgttaaaaaagaattagttaaatatttaccgctgaaaattgcagctagaagaatcaaatagcatcaacctcacaaaaatgggggtatgggtctgatcgacctgggtaaacaacttcaaggtagaagagcatatttcatttatataacgactattaaacagaagttaaaatttataaatgaacatcttttgacattaatcatctcacattcattacaaggaattattaatgttatgatcagaaatcattatgcataccattgttattatagatatgtcgaaaattacatattatcaaatagagctgtacctggaactttaccaaaaataaaaataccaggctctatttcaaatggattaatttcaacatatccgttcagtcttcttctgcataaaaatcataaaatatggggaagtaatattactattgaagaaactctttcaaatgaaatgtcaaaggttgcaaaacctaaaataataaatgtaaatacagggaaaataataatcgatcttgaaccaaatatcaattccattatcgaacaccctgtgaattacaacatggatgaagcttcttcaaaaacattagcaccattaatggtgtactctaatattttcccatatttgcagggatggtattatttgactaatattcactcagattttcaggttaaagaaactacagacttcaatacaacatcgttattttcaatggtggaaaaaaatgttcaaaaatggaaaattgtagaaattttcaataaaaatcaggaaatcaatattgaatcatttaaacatttttcaaaaagattttacaaagaagaatttaaagataaatttaattcagattactgggatggtaaaatagaaaaccaattggattgggaagcatgctttggttggttgggtagaatcacaaatcaaaatcatgctgactataatgaattgtttgaaatacaaacagggatgttgaactctcatttctatcacccttgtcaattctgcgaaggggaaggtgggactcatcatgtctttttcaactgtaaaggaattgaaataattctaaaagaattagaaataaaaattgatctaaaaaatattgttggtttaatatcaacaaagaaagatgcttataaggcaaatataataatcaagttaattatatttttcaacaaacaatgctaaaaaagcaaaaagaatgatccagagtttaggattaacaaaagatttatcacagatacatatttggtattcgaatatgaaaagtttagttcttattagatctaaattagaagaaaaaggttaaagaataacctagtaaaaataatttacattgagttcagtatatgaagatatattgaattgatgaagcatgaatgatatatgcgtataagtaattgttgagatggttaatctaaacataatttctaatgcctcaactaagcctcaattaaaatgcctcaattaaaatgcctcaaagtttcatttttcattactatataagggaacatgtgttcccacttttattatttgtatttcctcttcttttcttcatattatttattttacttttgtttatcttatttaaataacaatacaaactatattttaaaagcttattaaaatggattttgctaataggattacccttattcaacagtttcttgaaaagaatgggttgttatgaatcatttgatacattacaacctgaatcattgtttatccaagaagtctatcaaaaatactgttattttaaattagaaaacgttgatgcatgggattccaaagaggaaattaatgctattgtttcttctgaagataagaagaagaaaaaggttaaatgttacaaatttggcggtcctcattacagaaacaaatgtcctgaattcaagaaggccgctaaagttgaagagaataatttaatcggtatggttgatctcattgatgaaactgagttagctgaaagacatgaagcaaacatgacggttcacagttgtgaacagaatgatcatgtagaagaattgaagagtaatgaagaatttactgttgaaaaagttagttgcaatgtcttagaagacaaggatggatctgcaaatagagatgaatttttaattgattccggtgctactacacatgttgtgaatgataagaaatggttatgcaatattgaagcgtgtaatatctatttatttgacatctattgatggtggtaatttttacaagaccagaggtgatgtttatttatcaaatggagtggttttgaaacaagttgttttagcaacatcattaccaagaaacatcatttctgtttcaagattgaataacgataaaaatttaaaagctactttcacccataaaggttgtcaagttaccaaaaatgacaaaattgttatcagtgcagaacttagaaacatgttgtattttgcaaaatttactttcactattaaggaagaggttcattcaatgattgacttagatgataattatatttttaataaagaagatgaagaagatgattggttacagaaacatagagaacttggtcatgcatccaaaaatcaaatgaaaactttagggattaaaaatccaaatggcactaaatgcttcacatgcatgagtatggtcaataaaaccaaaggtggtactgataaccatgattatgatgttggtgagttaatccatacagatttagttggtccaatgtataatgaatatgctatagtttctgtagaccataaatcaaaagttattttttcttacattcttcaaagtaaaaatgaagcttccgataaagctattgcaacaattaagactttcaataatttgttaaaacaacaagacaaaagtatttgctacattagatcagataatgaattcaatacaagaaaactaaatgattattgtcagcaaactgggttgattttacaattgacagcttcacatagtagtcatcaaaatggaaatgcagaaaatgctaacggttatctcaagagaaaggttagaattttattagaagagtcaggtttagataaatcattctggaagcatgcttttatgcatgctgtatttttaaacaattatttaccaagaaataataataaactatcaccatgggcaattttaactggtaaagaaacaaatgtcaaaaatttatatccttttggttgtttgatgtttacgcataattatattaacgatcaaaagatatttaccaaaactaaaagtggtgtatttattgggtatgataaaacaataaaaattgcattagtttatgatgctgatgaagataagattattaaaacttcagcatttacaggactcaaaaatgaatttccatttagacaagaaaagtggtatgaaaatagaattacagatgacagaacaagagatatgaatggtgataatgaaaccgcttctagttcccataatggtatatatggtggtggatcatttggctcatttactgagtctgcacaatcattcaagtcttttggtactggtgttgctgccagtggtcattcttcaagcaaagacagcacggaaaaacaattagatagtgttgtagaacgggttaatacagataatgatgtgaatattaaccaggaattggatttggaacagggatcagagtatattccatcaggtgaatcatcaattaatgatactttagagatttcaaatgatagtgataagatggatattgatcaagaggttcaggaaaatcaaacacatcaggaacagctagttcaaacctcagttaaggaaagatttttaacaaaactaagagaagaaagagagaataaacattacaaaaacgccaagaaatcttctcatcaagtcccagaaaccaaaactcaatcgaaattaccttccacttcagatacatcacttttagaacagttggactcagatgaatccagtaatgaaaatgattattcagatgcttcagaaaatttggaagtcaataaggtaatagtcaattcaatggaaaagataaataaaatgtatgttgctcactcggatcatatatcaaagcaatatactcaattacttgaaagacaattgagtcaaacaaatgaaattatgaaaatgcagagagaaaatttaactagacctgttaatatgcttacacaacctagtccatttcaaatgaataagaatactggtaacaatgataaacttgaacagaaacaaattggttcctcaaaggttttaaaacaaattactgcatcagaaaacccaatagataaaactaacagtactgatgttgttgcttataatccagcaagtaaaagaacagattcgtatgaaaaacaatttggttcttctaaaagaagagttcaagaaggcaatactttagaagtatatcaaaagtctccagatggttcaaggactccatatgttgaaacaactagtaaattttatgttgatttaaatgatcaagaacgaaatcaaggctcatttgttgatagaactgcattttatactaaatttccaaataaagaagtaggtaatctcaagaatggtgataataatgcatctgataaaaatgtggatagtataagtactgctaatgctgtgaataataaacattcatttaataataataatcaaactcaacttcctccttcaagagtttttcaaacaaattggaggttcacttgacgatgacaatgaagatgtaaatatgcaagaggcaaatgttttagttgaaaaattaaaatatactatcccaaatacatataaagaggctattagaacaccacaagctgaacaatggaagaaagctgtattagaggaattcaattcaatgaacaagaaagaagtttatacattagttgataaatcaaagattcctaaaggtgctttagttgtaggaagtagatgggtgttcaacgtaaaattagatccaataacaagggatgaaatattcaaaggtagaattgtggcaaaaggatttacacaaaagaaaggtgttaattatcttgaaacatattccccggttgcaagattcgattctttaagattagttctttgtctgtctgccatgatgaaatgggatattttacaactagacgctaaaactgcctttttgaatggtaaattagattataatgtttatttaaaagctccagatggaacaactaaaagtgataatctggtttggaaattacatagaagtttatatggtttgaaacaatctccaagaatatggtatttaacagttaaaaaggttttagtcgatagtgaataaaaaaattcaatattagaaccttgcttattttggaaaaatggtgtgatgatggtgttatatgttgatgatattttaatttgtggaagaaataagaaattaattgaagaagctgcaaatgtattgaaaagaaatttcgagatgaaagatatggggtatccgaaaatctttttaggaattactattagaaaaacagataacggtttgtgtttgtcattggaagatcaaattgataaaattgaaaaggaatttgatttctctactactgaaagaaagttaaatactccattggtgaaaggttttgataagaaagtagataattccccacttttgaataaggttgatcactctacgtatagatctattattggtaagttatcattttttgctaatacagtaagattagatattgcatttactgtttcatatttatcaagatttttagaaaatccaactgaatataaaatgaaagcagccaaaagagcattacaatatgtgattcaaactaaacattttaaattgtattataataataagttgccagttaaactcaaatatactgattttacatatttggacaaaacagaaactgaagttgaagtagaatatccagatgaaggtaaattgaatttgattttagtctcagacgcagattgggctggtgatattggcgaacgaaaatcacaatctggtaatattgttttattaaatggaaatataattaattggaagtctacaaaacaacaatccttttcaagatcaagtgctgaaagtgaatatgttgctttaagtgatggtttagcaggtgctgtgagttacagatgttgaattgaggtaatcctattagcaaaatccattttaataagcttttaaaatatagtttgtattgttatttaaataagataaacaaaagtaaaataaataatataaagaaaagaagaggaaatacaaataataaaagtgggaatacatgttcccttatatagtaatgaaaaatgaaactttgaggcattttaattgaggcattttaattgaggcattttaattgaggcattttaattgaggcttagttgaggcattagaaattatgtttagattaaccatctcaacaacaggtgcagaaacatgccaagcaacatcactactagcaccttcaacattattaccatttgctggtttagtagaaacaggaacagcagcagtacaatttggagaaatatgaccagattgttgacatcttctgcaaataacatcctttgaatttttaggttttctgtttctagatttaggcttgttagcaataaaagcttgagcaggaggagcaccatttggagatgaagaggtagcaatatccttgagagatgcttcaatagctgataaactaatttgaggatcagcagcatctaaaattcttgaattgaccgagggatcacaaaacatttgaagatataaaagacctaacaagtgatcaatggtcataccatgagtaaattgagatctcatgggtctttaaaaataataatcctttgtcaagtggcatagaggatgatttagttaatttgtcaaccattgaataaagttgacgggcagacaatctagaataatctcttctaattgctgctaataaggcagaaccagacaagccttcacattgataattggaaataatattaccatcaacggtattaataaggacaacttgaagggcccggttaagataaaatgttaattgaacaacactggggtcatcatccggtgaaactaataaatcaccgtcagtaaaaaattccaataaaccggacccaaaagtagctaaaatggagcgaacacccacatcccaattgtgataattttcagcagatttcaaagtattaatagatgactttggacacaagtgagagaatgaactcataacctgttgtgtgagggtaattctatttgtaaaatccattgtctgttcccttatatagtaatgaaaaatgaaactttgaggcattttaattgaggctaagttgaggcatttaattgaggcttagaaattatgtttagattaaacctctcaacaatttatatgtctgaacacacttttcagcaactttcgactgagaatatttctactttggaaatgaaaaaatggtaagaccaaaaggtttcttttcgtaacctctctcaatgttagtatgaattagttctgatttaataaataaaatacaaacttacgtttgcgccatttgtgtcttctaaagaaagagctggaaagggaaaagagttacagaattgaaacactaatgagttcgggtttaggttattcatgttgaaaacaaagacattacgtaatatctttaatttctttattctctacatgtgaataactaacgacgatatatcgattgttgaatgtttgcgtgcaatgttagaacctcagaggttgcaagtacttcttctaatattaaaatatttaaacaaagatatatagtaaactattgctcggtcgcaaatctgaagacattattgaactcgggatgtttatctgcaatgatattatcatattcttctaaaacatgaataccaaatacttcaacattattatccaacttcctccattcgaattcagtatcagaatcaagcattctagaatataaaacaaattctaactttcctgaataagcctctatccaatcgtgctcaatatttactctttggaatttcattaacaatttagaacgattgttcatctcaacatggattagtctttcaaccttgacatattgccaggagttctcttgaatttggcatatcttgttgcaccctctttgcttatgaatgtattttgagaacaaaaatgtctctgttctctcaaaacaaccacatcatcttcagaaatttctccttttgcatataattctgaaagaggcatttccaaatcactatccctcaaaatctttcaacactttggaatatgataacaactcattggatcattcttatatttatttataaatggatttgcaattatcaattgctaagaaaggcatttgattttgagtggttttgaaactgtttttatgaggactaagctttttcctgactgtgcagcagcatctttcagtaaaacaacaccaacaatctctaaaagaaccaaccgatttccacatatcaaacatatgaatcatttgatgagtaggtacactaaaaaaattactaaatattggtttatattcaggaatttcaaataatcgtttcaaatttaaaatcaattttatgtaacttcttttcatttcatttcttccatcattatcaacaaaagacaatggaacattggtagccaccaaagcaataacataagcattcaactcgatcatatttttaactaaaaactgaaaaggagtaagtggatgattagccttgagttcttcagcaagtggcaaaaagtataatgggaaaatatgggaaaaagcctttacatcaacagctttaactctactagcagtcatatcttttgttaaatagattttgatatccttttattcctcaataaatttgacagttcccaaaaaaacatcaataccttttttatgttcaataatttgtttataagagacaggatctagagccttgaatacagcagaaaccaatatacttaccaccctcttagttataaaattttcataagcagtatgcattaaatcagggcaaacttttttgaagaaatctgggagatttagatacgaaatcaaggattttgccttaaccctccattgtgtcctattaatacgccctaaagactctcgcatacgtgacaaatatgtttcagttgtaactaataagtcactaaataccttttcagcatcatcgacatctatttctggaatctcatcaaaaaaattataaacatttacctcattattatcatcattattaatcccatttctgtttctacgcattgctgcaacaataggagtaaaaagaattttattatctgtcgtcctatgaatttcacaaaaagtgcatggaaaattggagcttgggccaagtgtttccgttgaagcagccaatgccttcaaatcagcagaaaatggtaataaattttacttttatagtaatttcttccccattttcaataaacttgaaacctttttctgaaagttgatttatttcttcaattagaggtctgcaaataatacccgtataaccagcagcatcagtttttgttaatattacttctgggatatggataaatttatttttgtatcttatcatctctggtaaatccataatcatgacacagttgaccttgacacctttataagtctttacctgcaaattacaatcatcattagaaacatgaatgttaaatgtaaattcatttggattgttactactagcttcaaaaaatctacgcattctatcagattgataaacagtagcaattgtatcggtatttgtaaaccatttctccctttcatcttttatatgctgtctaatttctttatttttgaagagtgaataaagaactggagtaatacattcatatttataggattctgcatcatcagatcatttatgaacctcattaatgttgtaatctgattactctagatgcagcgtccattattaacaacagtaaaagttatttaaataaactaaataaaatataaataaatataaaataaataagaaaaaacaacataaaagtaatattaacaaaccttgaaattcttcgttttatctatactaagaattccaacgttgactaataatttcttttcctgatttgcgagcaacactaaattttgattggttcttcgaggttcaacttaataatacaatattataatttattattcagtctcacttagaattaacaatctcaacaatctcaacaattaacccacctactatctaccctaatttgtacagtatgttcttgagtatctttattttcaaaaaagtaaagatgttttgaacattttttacaaaattgtgaatatccttacatggtacctattttatgccattcttttaaaactctttcatttaaacgtcttatttctagatctttatcatcaattaaaccaaataaagccataaaactcaaaacaatgttagccttattcatggaaataaaatgctttgaagccatccaataaataacaaaggaacaggcagttctaaagagatcccagaatttatgatgcataaaatcatcaaattgttcagcatcaaaatttggtttttgatattcccaagaattttcatcaactacttcctcttcaatatcattatttgaaaggttttctggttgaacatcttgattgttttccccttcatcttaactactttcatcagaataatcagattcatcgtcgtcaggcattatttctgaagcatcatgaaaaaactaccaccatcatcatcatcatcatcatcatcaccatcatcaccttcgttaccactatcttcagaagagctagaattaccagaatcaaaaccatttgaacgtaacacattattaacttgagtattaacttgatcattgatattattaggaattggaaacccatctgtaaggaatgaatcaaaagcatcagaaaaaacctcgccatcattgatattatcaggaaatgatagcccatcatcaaaagcatgagaaaaagaacctcatgatcattgatattattaggaattggaaacccatctgtaaggaatgaatcaaaagcatcagaaaaaacctcgccatcattgatattatcaggaaatgatagcccatcatcaaaagcatgagaaaaagaacctcatgatcattgatattattaggaattggaaacccatctgtaaggaatgaatcaaaagcatcagaaaaaacctcgccatcattgatattatcaggaaatgatagcccatcatcaaaagcatgagaaaaagaacctcatgatcattaatattattaaaatttgaatgattattatctaccgacattccagaaaaagtatcatcaccagaagaactcccaaaatcactagttaaaacgtaatcagtttcgtatgcgtcacaattgtttatttcaatggatggtgaatctattatatcattgtaatcccatcctttttcattaaaataacatttaaaaatttcattcaatgtatctgcaatatcttgatctctctttgtatttcatgaaattgtatgatgattctttaattttttccaaatcttcaaatttacgtcttcttcttgcactagctctcagtgtggttaagaacttaatattcaaaccgtataaatttaagagtcccactaaagaacctctattagttaattttgcatttttgaattgtttaaaaatgaacttagcttttcttttattgatattcgcagacccagacccatatttattttcaagagtcacaatatcatcattgatatcttgttgaacaattttatcaatagctttattatattgaataccaccatacgtgtgttaccctgatctctcgttataaaagaaattgaagtttgaagttgtacttgttgcaaaactctttaaatttctttcactcaaagcatcccctttttcttcctgataagatttgatatttttgtatcgaatattttttacgttcttaatagtaaaagaaaatacacacggtatatctgtttccagtatcgttggtactttttcccataaaaaagaaagaaacacaggcgtatcgtctctgtaactcatcgagatttttaaataagaattacgtaacaagccaccatgattacgtaataaaatttaaaatttaaagttaaatgattagttaggatcccccagtctcggagagcccaaatataccggtgagacccttcaaaacttacacattgttaaaatacaaaaagaaacatacgattacgcttttgtcagggatgatataaatatagaatttaattacgtaagatatattataagtaaatgatatattgatagtaataatatcataatataggtaacggggcaactcgttacatgagatatgtataagaggccaaattcccacaggatataatatgtggaaataactaatagttatgtagttcttttatatagattcttatagagctatagagaaatcatcctttagtatatcttattattagattattacgtaattgtcatattcgcagaagtaacaaatataacagatttttagccccaaaatcgaacaaatttgaattataatggttgcagccccaccaaaatgcgggttttgaaaattttactatgtaaaaaagtcacaaaatttcccacggtgtataagttaagaaagaaaaacaattagtaagttaaagaacagttaagaggaagtggaaatttctctttatatagacaaatttatgtctaagataattggtgttttgattaataatcaaatgtttcatgtttgtattgatcataatatgagacattcgtaatcacaagtattaccaatatcatatggtctaaacttatttataaatagatgaaacataggtgaaacacatctatttatagcaacaatgaaacatttgtatctcaacattaccttttaacaaatctatctatagttacaatgaaacatttaaatctcaacaagcagttatcagctacaactagcttacgtaatcataaaatataaaacatggattagtagcagccgggctaaaactgagaatgaacggtcggtaatttaataaggaactacttgttaaaataaaatataaaataatataaaataaaagaaaagaaataagtataataataagtaaataattaataattgtaatttggaggataagtaataagagaggttggcattctcgaagtcgagaatgaattaggataattctgattggttggttacaaccaattaacaaaagaggaaactcttgtgaaattgaagagttaatatttttttttttccggtcaacttttgtattactataaatttataaaagatactataaatatttttctctaaaataaatgctatataataaaacattcagtccggttaagggaaaggaaaatcctataaaaccctttgttgtaatctaacgactctttgggcaggatccatatttatgacaacagcagttattaaaagaacaaactatcttatatataaaattaagttaaagtatataaaataacaacataaaagtaatattaacaaaccttggaattcttcgtggtacttatactaagaattccaacgttgactaataatttcttttctgatttgcgagcaatactgaattttgattggttcttcgaggttcaacttaataatacaatattataatttattattcagtctcactcagaattaccaatctcaacaatgttgtaatctaataactctagatgcagggtccattttatgacaacagtaaaagttatttaaaggaactaaataaaatataaatgaataaattaaatacaaaactaactaaagaacttcttaaaaggaacgttactaaaccttggaattcttcgttgtatttatactaagaattccaatctttactatcgtttctttttctaatttgtaacgtttcttttttatgatttataacgtttctttttctgatttgcgagcaatacttaattctaatcagttttcaaggctcaacttaataatacaatattattatgtattattgagtttcgcttagaattaccaatctcaacaccctaccatgctcacaaatcaatcacatcttgaccataccagccatctcaaccatttcattgaatttaattctattcaagctttttgttaacatatcagcaatcatataatttgtactaattgatttgatttgaacatctttcttttgaatatgatctctgataaaatgatgtctaatgtctatatgtttggtcctttgatgatgaacaggatgttctgacaacaacttacagccttcattatcttcatatatagttgatgctgtaccacattttaaacctaatcctttcaataattgtctaatccacaacatttccttaacagcatcacttaaggccatatattcagcttctgtggatgataaagcaatagtttgttgtttcttgcacttccaagtaataattgaattacctaacttaaaaatatatcctgtcatagactttctatcagctttatcaccagcccaatctgcatcacaataacctactaattcaaaatcagtaatttcattgaacatcaagcctaatttggttgtacctttaatatatcttaatgtatgtttacatgcaattaaatgtttagtatatggatctttaataaatcttgataagtatgaggcagcatatgataaatctgttctaactgtattagcagcaaacaacaacttccctaccatgctgcggaatactgtagcatcagattctgaaagtttagaaccatcatcaatagaatcaacatttgaaggaagtggtgtagaaacagcattacattcagtcataccaaaatcttgtaacatattgtttaaatatttattaagatgtagggatataccattccaactctgtgaaatttccatacccaaaaacgtattaaccaaacccaaatccttcattttaaaacttgaattcaacaacaatttgacttgatcgattagggccatattattagacaaaattaataaatcatcaacatatagtgcaactaaaataacttcatcattgacaatcttggaatataaaccaaattcagataatgaccgtttaaaacctgcagatagcattacattgttaattttcatattccaacagagaggagcctgtttcaaaccataaagactcttacgaagacgacataccatgttttctggagcgttagcaccatctggaaccttcatataaatttcttcttcaagatcaccattaagaaaggctgttgtaacatccatttgatgtaccaccaatttgaattgtgcagcaatagcaaataagattctaatactttcatatctaaccacaggactaaaagtttcaccataatcaattccttgaacttgtctaaatccttgagctactaaccgtgctttaaaagttggtggattagtattatctttgatattaaacacccaacgacatccaattgttcttctatgtgaaggcagttcaactatatcccatgtatgattttctttatgtgcctctaattcctttttaatagcaacttcccaaaatttaacatcaggtgaattcatggcttgcttgaaagtggtaggaattgaatttaaagctgatggtatagaagcatctttaatgaccttgaaaatagcaccaagaaatttttcaacccttttgggaggtggaccttcagtatcagtaacagcagaaattgatcttaccaacggagaagaggaattatcagcgtcagtaagttgattaatcaagtctaaatctacttgtaattcagcatcgattggaagattatcagcaatttcagaataaatatcatcgatataaccaagatcaacctctgcttgatcaaaacctaattccggaacaacagatggagcggcagatggaacaacagatggaacaacagacgaagcagcagatggaacagcagatggaacagcagatggaacagcagatggaacagcagatggaacagcagatggagcaacagatggagcaacagatggagcaacagatggagcagcagatggaacagcagatggaacagcagattcattttgaatttcaattgaattttcatgttgaagttcattcgagatattaagatcatcatttgaagaattagcattgacagtatcatcagaaacaacagtagttaattcagttgttggagaaacagtaggtgatgtagattgaacagagacaatggattcctcagaggcaacattctctaacaaaggcgatgatctaagttcggatgtattccatctagttgattttgaagtagtattaggatcatcagatggaacatagctagaatcagtatcaacaacagaaatatcaacaaccataggaagaacagcaccaccagttttagcaccaaaattaacatcagagggaggtaacatattagaaataggcaaatctgtagatttcttatatggaaatagtttatcattaaacttaacattattggaaataacgacatcattgagtgaaggaatgaaacacctataagctttatgaagggaactaaaaccaactaaaacaccagaaacagaaacaggagaaaatgaagatgttcttttctcaggtggaaccaaaacataacaagcaacaccaaaaggatgaataatatcataatttggtttatacccataccatctttcaaaaggagatttaccattaagattagcagcaggatatctgttgattaaatattcagcagttttaacagcttcagaccaaaaattttcaggtaaaccagatgaaaacaacaaagtgcgaaccttttcttggatggttctatgttttctttcaacaacaccattttgagatgaattataaggaacagtcatttgatgagtaattcccttttcagcacaataagcatccatttcatcattacagaattcaccaccattgtctgttctcaaaattgcagctttgaatcttttagaggcaaataaattttcagcagtttgaataaatgatttgatcaactgaacagtatctgattttttttgaattggaataacatgagtccatcttgaataatcatcaacaatagttaagaaaaattttttatcattagtgcctttaactggaaatgaaccacaaacatcagcatgaattaattgaagtggagcactagctggaggagtagttgatagtttaggataaacttttgtcatcttaccagctgcacatgacacacacttttcaacagatggaccacctgaataacctaataattttaaggttgcaggagaaggatgacctaatttagaatgcattaattcaacattgaccgacttgacagcaaaagtctgagcaacagatggaacataatcagagaaatacaacgaaccttcggtagaaccaatttgtaatttagaatcaaatccatgtggaataaaatgaactttatgttcagaaaattgaaaaacaccaaacttagatgctttctttactgataaaatattttgagtaccatcaggaacataatgaacctcatttaaagtaatttcatggccagtagatggatgaactaacttgactgtaccaatcccttcaacatctaagggttcttcagcaataccagaaactttaccactaataattctaaaatcaacaaattggtctttgtgaacagcaatatgaatattggatccagaatctaacaaatattttcttgacaaaggcaccttaacatttgaagccatccatgcaaaaccatttgaagtggtagtagtgaatgctgatccaccttgtttcggagcattagatgcagaagcaggagcaggagcagtacaatctctagcataatgaccaggaacttgacatctgagacatgtaatttcatttggagttcttttaaagtttctcttaaatttatttttattgttcttaaccataaaagtttgaggaacagttggactaaaatcttcaagtgccacttcaacagctgataatgataaatcaggtgcagcacaatctaaaactttagctttagctaatggtgagttgaacatttttaagtaaaataaccccatcatttgattaatttcaggagtattattaaattgatagcagacgtttttgaaaatagctaaagcttcaccaggagaagtacctttatttctggcatcaacagcagaatcgaccaaattggatagttctctaacagagatatgtgaatatcttcttctaattaacactaataaatcaaaaccaacagcagcatccgtttcaaacttatcaaggatagctggagcaacagtacagtgcaaaattgattgaacaattaaggtgagaataccttgaatttgtgcacttaggacatcagtagtatcaggagttaacatcaaatctcctgaagcaaaatagacatcaacacctgcatcaacagtggccaacattctaccaacatagttttcccattttggatagtttacagcagcagatagtttagaggtactatcctttggaaatagagtcgagatttgactcataacctgttgtaatctaataactctagatgcagggtccattttatgacaacagtaaaagttatttaaaggaactaaataaaatataaatgaataaattaaatacaaaactaactaaagaacttcttaaaaggaacgttactaaaccttggaattcttcgttgtatttatactaagaattccaatctttactatcgtttcttttttatgatttatgttgaacggtaacggctctagtatagatatccatagttagttactttaaggttataaaaagaaataataatatataagttataataaagaaaaacaataagtaagttaaagaacagtaaagagtaagtggaaacttctctttatatagacaaatttatgtctaagataattggtgttttgattaataatcaaatgtttcatgtttgtatttgtcatcatatgaggcattagtaatcataagtattactaatatcatatggtctagtcttttctataaatagatgaaacctagatgaaacacatctatttatagtaacaatgaaacatttgtatctcaacaccccaccataagctaaacatcaattaggttcataccagttagtttcacaaatctttgaaatttgattttagataaacctttagtaaacatatcagcaatcatgttttcagtgttaatagaatgaatttcacaatcattatttttaatatgatccctaataaaatggtgtctaatgtcaatatgcttggtccgttgatgatgtacaggatgtgatgataacatcttgcaaccttcattgtcttcaaaaataattggtgtttcatagattttcaaaccaatgtgttcaatcaattgttttaaccaaagcaattccttaatagcgtcacccaatgccatatactcggcttccgttgaagacaaagcaacagtttgctgttttgtggatttccatgtgataacagtgttacccaatttaaaattgtaaccagttatagattttctgtcaactttatcacttgcccaatctgagtcacagtacccagtcaatttgaaattatttgaatatttaaattctaatcctaaattcaaagttcctttaatgtatcttaatacatgtttagcagcatttatatgatttggatgaggatttttaaaaaatcttgataaagaggatgcagcataagctaagtcaggtcttacggtgttagcagcaaataatagtttccccaccatggtgcgataccgagaggcctctttttcatgaacacatttaccttcgggaattaaagaagtaccaggtgcaataggaacagtcacagaattacattctgtcataccaaaatcagccaagaaatttaataaatacctgttgaggtgcatgcacactttttcatcatcttgcataatctccatacccaaaaatgtagaaactcttcccaaatccttcattttaaactttgatgataattcttgtttaacagctttaattgaagcattatcatttgacaaaatcagcaaatcatcaacatagagggcaaccaaaataataacacctgaggaaaccttagaatagacaccaaattcagaaacagctctgttaaaaccataatttaaaagaaccgaattaattttaatattccaacataaaggagattgcttaagtccaaaaagacttttcttcaaacgacacactttgtcgacagcagtttgaacacctgggggataaccatataaatttcttcttcaagatccccatttaaaaatgcagttgtaacatccatttgatggatttttaatttaaattgtgccgcaagagcaaataaaactctaatactttcatatcttacaactggactaaaagtttcaccataatcaattccttgaatttgtctaaagccttgtgctacaagacgtgctttatatgtaggtggtgttgttgaatctttaatggtaaacacccatctgcaaccaatagctctacgatgtgctggtagagtacataattcccaagtattattatcaacatgagcttgaagctctttctcaatagcatccgaccaaaatttagaatcagggccacttaaagcttccggcagagaggaaggaatgtagtcagatgttgaagagtcattgatgactttatgtacagcatttaatacatggaatgaagacccagtgtgttgtcttttagcatcaggaccatctgtgtcagtaacttctgaaatcgttcttgttaatgagttttcagtactagaagcatcgggaaggatattgataacctccgagtcttcattgaggatattattggatctcataatttcaaaatttgattcaaccatctgaatatcatccagcaaatcaccctgttccagcatatatggcattattggggcatgaacattatgaaacaaatcatgttcattcatataatcaaagtaatcatcaagttctgtaccagcaagtacagttgtagtttcagtttgcgtttcagatcttccagtaacagatgaaatatcactagcagtttcatttggtacataatcttcgtcttcagcagaatcatattcatctagcatttccatacctgcaagttgtggaccattatcttcatcttgtggggattgattaagtggtctatgactaccaacatctaaattaacattttcattttcatcggcagaaccgataacttcttcatcagcatcaatagagtttataacttcctcaatagcaacagttgtatcaatatttgcatcttcattttgagtctcagataatatagagtcaaattcaggaggtgtggaaggtaaaacattggtggactcaaatctaaggaaggtaggttcacctgagtaatttccagatgagttggtaatatctaatggaagataagccccaccagcagctgcaccggcataaatatcggacggaatttttgtttgatcctcaaccttgtccatatctcttttcttaaggtatggaaagtaatcatcttgaaatttgacattatttgaaataacaatgtcttgtaagtccgggacgtaacatctgtatgccttatgatcaggactgtaacctacaaaaatagcatcaactgttgaagcatcaaaaattgaatttcttttggttttaggaaccaaaacacgacattgaacaccaaagggatgaaaaattgaataatctggagaataatcgttccataattcaaaaggagatttatttttcaaataaggagatggaagacgattgataacaaattcagcagtcttaactgcttctgaccaaaacttaatgggagcaccggctgatgcaattaatgttcttgttttctcttgaatggttctatgtttcctttctgcaacaccgttttgagaggaattgtaaggaacagttttctgatggaaaatacctttttcataataaaattcatccataattttgttgcaaaactcagtaccattatcggttctgattttagataccttatatcctttaccactaaaatgattttcagctgttttaataaaattcataacagcgttgttgcaatctgatttcacttctaatggaacaatctgagtccatctagaaaagtcatcaacaatagttaaaaaatatttttcaagaccaataccggcaaccgaaattggaccacataaatctgcatggagaagttgcaaaggaacagttgatttaggagaataaccagcttttggaaaggtcctggttgacttaccagctgcacaagatgaacattcaatcatatttggagcatcagaaaatcccagttgtaacagtgtttgaggagatggatgacccagtgcattatgtgcattcaaagttctaaggggtggtctagcgagaaacacagttgcgttttcataccttgtaaccctaggtggaaaatccaaaacatacagataaggatctttcaatgtagcaatttttcttgaaatattgtcagcagaattggtaaacattgcatgatcggagtaaaaagtaaaagcacctgttgatgaagccttcttaatagaaattaaattttgcatggcatcaggaacataacaaacatcattcaaagtaatcttgaatgatgtttcaggatcgataaactcgacagtaccaacacctgtaacatttaaatgggtgttagcaattccagtgatggtaccagtggattcacggaaatgaacaaaatggcgaatatcctttgaaatatgcaaagtggatcctgaatctaaaacatagctttctctagctacttctgtaacatcagttgtattgtagactgaccaaccaactccactgttattattagattcagattttggttttgaatctgaagtatttgacttgtttcttgaagcaggagctggagctaaacaatttcttgcagtatgtcctttcttattacatctgtagcacataattgaagaagaagaaccaacattggatgaagtggttttggaaccacttgcagcataactagttgaaaccgaagataccatatcacgtaacttgttttcaacaacagacaaattaacatcaggatctggagcatccagaatccttgaacaagcctgatcagacttgaacatcattaaataaaataaaccagtaagctcttgaacagtaggagcttgagcacaaatatctcttaaaagagaaaccgcagtttcatcagaagcggatttgttcaaagcagcatcagcagctttcttaaccatatcaaacaattgtctcggagagactttagcataatcacgacggattgcacacaacaaattataaccaaaaagattaaaaccttgatattttctcaaaatctttcttgaaacagtattcatcaaaacagtttggataccattttccaaagctgattgtaacttcaagatattaacatcatccgaagtatcaccatctgggatgaacatatcaccagattcaaagtatgtatccataccaacaccttgggctgccaatgtcattttcgtcatattatcccacattggatagttaacagcagaaaccaacttagaggattcgtcctttggacaagctagagcaaagtggctcataacctgttgaacggtaacggctctagtatagatatccatagttagttactttaaggttataaaaagaaataataatatataagttataataaagaaaaacaataagtaagttaaagaacagtaaagagtaagtggaaacttctctttatatagacaaatttatgtctaagataattggtgttttgattaataatcaaatgtttcatgtttgtatttgtcatcatatgaggcattagtaatcataagtattactaatatcatatggtctagtcttttctataaatagatgaaacctagatgaaacacatctatttatagtaacaatgaaacatttgtatctcaacaatttataacgtttctttttctgatttgcgagcaatacttaattctaatcagttttcaaggctcaacttaataatacaatattattatgtattattgagtttcgcttagaattaccaatctcaacaaacaatctcaacacccttttgttatattgtaaaattaaatgaaaaatgaaaaaatttcttaattaggaaagaggggagcgggcgaagtcgttcatttacaaaaacataacaagcgcaagtggtttagtggtaaaattcaacgttgccatcgttgagcccctggttcgattcctggcttgcgcaggtttgttttatattcgagatagtttagtggctagaatttccgcttgtcacgcgggagaccggggttcaattccccgtctcggagtttttttatctttcttattttttttctgtttcaaataataataataagagaaattttacagattcatgtaaaatttaccataaaataatttttttggccattttctatatatacaccgttggcccttggtcactaacaaaaaaaaaaaaaacgctaacaaattttcaaattttgaaaattcctgaaaaatggaccattttcaacacagtttataagtgtcttctacgcatcttcaagagttcatattgtatattcttgctcgtgaagaataggagattacaatgatataatttttgtgtagttaatgtcaatatcaagaaaaaagtgatttttgaaatctaccccaaaaaagggattttttaattccatttttgtattacttatatggcttattttttagtctctaaaagctctatcataaagttcttaatttgcacattttaatgatgttatttttaagttgcttaagcatgtctaagtgtatgtaaaatagctctgaaaaacagtaaaaaaggccctttttgtgagagaataatctgaagaaggctcagcgaatatacctcgaaaatcatgagaatttccaaaatcatgctatagccgtgcctgcttaaatataggcgagtaattatgcactgtgttaagatgatattattaagtaaagaaatacttaattataaagtgttattataaacaaaaagaaaaaggaaaagaattataaaataataaagagcatcaagtatcccatcaactagttggaacacttggttttcttctaaacatcattccataatgaggtctgacatcaagcaccattttatcatgttttggtaaaccacttattggggtgatattaacatcattatctagccacatccatcttgtactctttgaaacatttttgatttcaggatgcagacatttttctaatgaaggagtaatgcatggaatccaaggagtaataatttccatgtctgcatatttgattgcaagtaaatctttaccatcataattgaatctaagaattctcattaccttaataaaactccactctttcccatttttgattttggcaaaacattgacaatcatcaagcttaagtttaagtgaacgaatagtgacataatcaagttcgtaaactgaaattagttttctatctgaaataccaaacttccttgaggcttgatttaacaaagtgccaagcttgtcgacattggttaaataatctccaactttgagcttataacaagacatattatcaaatttcatattcctaattgctctcatctttgaatataacaaaattggaagtctaattccaagagttgtcattgtatgacgcccaggatgagccagattttttgtatctttacaagccctttcggttggaaaacaccaagtatcaacataagaaccaacatcacaccatttttcaaacatgtggataacgtagtgagttggaacacaagagacaacgttcaaaaatgaatacttcttgcttaagtcttctaatttcttcatcaattgaatataattattcttaagcaatggtatgtcttcacgtggaacaccttcagccataaaacagattaaatgatgattgatttcagtcagatatcccaaaatttcagagtggatattattcaaacctaaattgcatttcaccatcaaaggaaaggcgtgacaaaacagtttggaatctactgccttcagtcttgaaccagcagcttctggggtaaaaaatttctttaaattaccaggttcctcaaacattcccttactactaaggtaatttttgattgaattaataccaaaaactaactctccaaacaatttcttatccaaaattttaaaacctttctctagtaatgctgcacatattcttttgggatgtatgttttctaaagcaacatgcatcagatctggtgcaacagaccgcataaagtcaaaaccaataaaaacagtaaacatattatcacctttcattttccaaatactgccttgagtagggaattctcttcttgccgcaagacctctaagttcctcagaagtaatcattggattatcatcgaggtttttgaatgaaagtggagcttccccagatttggtactgaccttcttgatcttgcaaaatgaacaagcatacaatgccttttgaaactgtaattccaaactaccagctatcgatggaatatcaccagtaaaggtgacaatgttggcatatattgtataagttacaccgtccaattttactttgaaaccttcattccataaatccatcaggtcagtcattagaactttcatgaactccctgtttgagcctggtgcatttgccacatttttgtaaaatgttggtataaacacagactctttttgtgtacgtagttctggaggtaaatctaaaacaacaattgcagagacctctgtattcaacatggtttttgaatggacattacagccatccattgacaatcctaaattaaaacaaaatgtgtttggttccttttctttttccgctgatctacggtacaaatcaccattcaaaacgctgtccaaagtttcagtattcattgcatgttttgccctattcatatccatagcttttttaattttttcttccaaaaagagaaacgcaagaaaaaccctaatactttcgtatctcattttaatccttctatcattagcatcacacttcgggttggagcatacagttaaatcacttttttcaagaatataagtggtatacccgcaaggacaagcaagataagtgatacctgttcctagtaggtcccattttcttctaatccaattgaaaactgattttgcagataacttatcaaaaagaagctcggattgctccttaaaaacagaaatagcaagtctaccagtacctaataaaggagccattgcatattgaactatttcttctggtgatttgtgaaaaagatcttgcaaaccttgttgatttaactggaataatttgtttgcttcaccaacaatactaccatctgagtttgtagaaggattaaccacaggtatattctcttcttcaatagccatttcctcaaataagtccaattcttcttcaacaacatcatgaccatgaatgtctctcaaaaacattctcttttgttcattagttctttcttctagtaattcttcttcaatttcttcatcctgtctttttttcaactctgacacaacttcatctgcactgatccctttaagtaataaattattttcaatagattttagctcattatctgtaaatgtactcaataaagaattggtctgatacaattgggtacatttatgtacaatcaaagaaagtttcagaatagctgccatagcatctattttccgtttcttttgctctaatgacaactttggaacattactcaatgtcatgtttcttttttctgacattggtaaacggccaaaggatggaaaatctagttgatttggaaatgtcaaagcatcttttcctgatgagtagttgtatttgttttggaagtaagtaaaagtctgttgtaaatagttcctattggttttgtaatgtccaaagtgttccttaattattcttttctctgatgcattgggaccccgaatgatggttttaaaataggaaataaatttagtttggtccatttcgtatgaatgatttggattatatcctgagaaataatattcaaccaatctatgtaagaaagagttatatctgtcttcattatcttccttcaacggttgtaatagatctgataaaatagtaataaaaagtggttgtatttcagaaatgaaattctctccgtttttcacatttttaatcttgcataattcatagaactttaagttaacaagttctggagttttgtcggtgattagatcctccatttcgatacgtaaagagataatactacagataaagtactacaaggttatagttcctatacacaaaataattattcgtcgattattcaataaaaatacccaaataggaaattaaattacaaaaaaaaaataactatttcaaatgtaattcttagaaaaaagttttaaaaaaactcgaagctagaattaaaagagcttcaaaacagagtctaagacaaatatttaacctaagtttccaccaagctaaagttagttttacaagataagacacttcctttttgaatttatcaacaaaaaaaatttttgagattacgtaatcttgcaaaaagcggagctttttttaggttttttaattaccttcggctctaaataactaattttttacccccggaccttgaaaaatttaaaaaaaattcaaaaaatggccatttttgagcgatttttgtttttttttgtaaaatccggattttagggaaaatcagctaaccaataaaacacttaatttaaattctttgatcatttccgcttttttgaaaagtgatgtataaatagaaggtgattcccactttttttacccaagtgttttaattccttttgacctctctcttcttcttcttcttcttcctcttcttttcttttgatttattttgtcatttattaagaaacaaacatcaaggattgacattggtgacaaaggtatgaacactaaattatagattcagtactttaacatagatactaacatttgcttataggttggttacaggttacgaagagttaattttgttggtatttttaactagttagatggattgggctaagtaagtaagttttatttcttttaattttaattcaaatttttttatttacaaactagcaatcaaacgcaaggaatttattactaacatttaatactaacattcaatacagtgaaggtttagctcttttggagaataaacaattttacaattctgtctttttttataagttaataaacccttcttttgtttcttatagttatttttttaatggatttttgaatatcttccaatcagtcttgtcaaagaagctacttgttgcacataatgaatttagggaagatttacatggagaatttgttgcttttttcaatgtgctatttttagattggttaagaactgatgtggataaggtagatgatgatgatgatcttaataatttggtgcaggaaatgttatatttgggatacaaaaggcttgatgtttactctagggatgttttaataaactactatcaaaacaatgtggatgctttcaatcaattttcttcataattaaaatacatggaattcttttcaaaaaaatcaaaagtcacgtgacatttcaatgacatcattatttttaataattattacttgaatttcaatgacatcattagtttcattaattattttttattttttattttttattttttataaaaattttataattttaaaatccgaaaaaaaattataaatccgaagaaaaaataaatcccgctccgagattttaaaaagagttttttgattacataagcattgattacgtaagattttgcttatgtaataattgattacgtaaacatctcaaacattcatagtaatttagtatgttcttaattgaaaaaaaattttttttttgaagtgctctgcgaggtaacttttttcgcaaaagtcgggccaacggtgtatacagtctctttagatgaatgagactaactagtaatattcagtaaccaaatgtatgttggtttagtccgctgtaactttatttatagccaccggcgatgattctttagttcccagtaaacttcccccgcgcttaataaaaatactggggattcaaaattttcacgggtagttgaaaatgaagttacaacggacttaactaagatacattcgatttttacatattactagttagtctcatttgattaaaaagactgtatatatatatacagttttctcaataacggttgattgaacaaagtaaagtccaatggttcaaattacagataagtatcatattccaaaaacatacgaagaggcccttagaacaccacaggaggaagaatggagggaggccgtattagaggaacttaatttaatgaacaggaaacatgtttatacattagttaataaatcaaaagttccaagaaaaaaaattgttaaaagtaaatggttgttcagtgtagagttagattctgagacaggagaagatgtattcaaggcaagaataatggcaaagggattcacacaaaggaaaggtattaattatggagagacatcagcaccgactgcaacatatgaaactgtaaggttggttcttagcttgtctgccatgatgaattgggatattttacaagtagaggctacagatgcatttttaaatgctaaatcacaatatgatatttatttggaaccaccagatgcaacaaccggagatagtaatatagtttggaaactaaatagaactgtgtatggtttgaaacaatcagcaagaggatggtatttcacagttagagattttttaaagaataatggattcaaaaattcagctgtggaaccatgtttattttggagaaaaggagtgatgttgatattatacgtagacgagtttttaatttgcggaaaaaataaatcaattaaagaaactctacagctgttaggaaaagacttcgaaatgaagattataggatacccaaacaatttcctaggaattaatatcaggaaaactgataatggtatagttttaacatctgaagatcaaattgatagaatggtaaaagaatttgatttttcttttagtggaagaaggttggatactccattggcaaaaggttttgagaaaaaggaagataattctccaccattaaataaaaaagagcattcagtatatagatcacttattggaaagttactatttttggccaatagtgtaagagtagatattgcatttgctgtttcttatttgtcaaggtttttggaaaatccaactacatatagaatgaaaggtgctaaaagactttttcagtatgttgttcaaactagattcttcggattacattatcataataacatacctgtggaaattaactacgacgaattgtttgtaagaccttatcctaaagaaggtaaaattgatttggtttgtctcacaagttcaaattgggtcggagatattagtgataagaaatcacaatttggtcatatgattttaataaatggaaatattatcaattggcagtctaaaagacaaagacatagaggatcaagtagtgaatgtgaatatatagttttgtctgaggggttaactgatgctcttgtttatagggatgttttaaaggaactatcattgagtgtttcatttatcaatatggtctgtgaacaccaatctgctcgtgcattgtatggacctgattcacaaaataaaagagtaaaggacattgatgtcaaataccattttgttataagttatttggatcaggaaaaggcggccaaattgaatcatatttattcagatgaaaatattgcctatatgttaacgaaaacattagatgtacctacgcatatggaatggtcagatatgatttacaattaaaagtttttatagattattgaatctgtagagaataaaaatagtgacattaataataaaaatgacatataatatatattagtacacattggctctcttttttcttgaattgctaaaacaatttattgataaacatttatttaaaatcatatgtattcgaaattgtgtatatgttaaaataacgatttgcaaaagcccctgaattgtataagttttttacattaaattttatacaaatctatacagcttggccaaataaaagatttttttcaatacagaagagtttaatgtaaattttcaaaatcatagttttttgtagtcttttgatcagtttagattctactttttgtattcgaataaaaatgtacctctttatttatcctaggttttattctgaattttaaatcaagtttcttatatttgaagcattgtttgttaaaaagtataactagtttgattattaaattgactgccgtatatgctttctcttttgaatctgcaaaatcaattagagtttttgtattaatatccatgttaaaaatgtcttagaatatctttacaatcaaaaaagacatgttatgttcatcttctactttccaaagttggcagatgtgataaaactgagaatctatcgaaaagtatacattgtaattgacatttttgatgattgctgattatattggatcaaccaaaaaattattcaaaagccatttgaccttcaattttgacacaaaagtaattgaaacttgaaaaaggtacctttaattttttcttaattactaatgataaagaatttttaacaccatatattgtctctattacaataatggccaaattaataaaatgcagagttattcttcttgcttttgtagcattgcttgttgaaaaacataaaattttgattattgtacttgccacataagctttttcctttgggaatactgaacaaacaatattctttggatcaatttctattactaacttatttaaaattcttttaattcctttacaattgaaaaaaacgtgataactccattttcacctttcaaaaatctagcctttttgctatgagaacaaaatttattcttctattttttttacattaatttcattaaaaaatacaattttatacagattgattatgttgtaatctaataactctagatgcagggtctattctatgacaacagtaaaagttatttaaaggaactaaataaaatttaaataaaaaaattaaatacaaaactaactaaagaactttttaaaaggaacgttactaaaccttggaattcttcgttgtatttttactaagaattccaatctttactatcgtttctttttctaatttttattgtttctttttatgatttataacgtttcttttttctgatttgcgaacaatacttaactctaaccagtttttaaggctcaacttaataatacaatattattatgtattgttgagtttcgcttagaattaccgatctcaaaagattagttatacgaatatattctttgaccatatgtccctttttttactgtatactcagtgactaatgtctcatttattacgtaatcatacaagcatgagtattttgaacaaaaggtttacttaaacaacaattggagggatggccgagtggtctaaggcggcagacttaagatctgttgggcgattgtccgcgcgagttcgaacctcgcttccttcaaataatttttttattagattattatttttgttcaaacgataatctttggttgaaagctaatatttatttcaaaagttgagtggttagatataggtataatctagtatatttaatggaatcaatcttattttcatttgaatctagcaaaaaagaggattatcgccaagatatatacaggctttgtttagtgctaatccacgtacattcaagccattaacaggttgattttctggaatcaggtttagtacatatgaagaatcccaagtatccatttttaagatagaggcaatagaatgaaacattaatattgtaagattacttacagaatgcctttgaaaattgtcaagtagttcagaaataagttgaaatttaaactaaatatcaaagcttttattctaaacttaatttcagaactagaactttaatgaatcgtgaatattaattatgtttgaatattagcaaaagagaagaatatctaaacaatatgaaaaaattacttgtattcgaaagccaagtgaataccttttatagttagtattttgtagggtgtgtcataggtatgggtaagagcagtaacaataagagctatttgtaccatcgaaacggaaagaaagaaagttggagatctagaagcacctttaaattatttcaactaagtgaacaatttaatctattcaatgatatcctaaaacattaaaaatgataatgcatcattttaatggtgaaaaggtggattttgtttgttctaatggtgctcctgaaattaaaggtttacatgatatagatgaatgtatcgaagctcagttaattcttcttcccattaattaaattaggacgtttggcatatctgctaccgctcaagacaaaataagaaaccagcaattaaatttaacaatgtttcaaatgataaaaatcaaaaaatgaatcctggagaataatttgatatctatgttgttgattttgtttattttccaattatttggtaccataggtaccagctttgtgtccaattcatcgtttaaaacatcacacaagacagttgatggaaatctcatggtacagtaaagatatattgaaagcaaaatgtaaatagtttgggcttaattgggcttggtatatcaattagcctaaacaattgtacaaatcgcaagactactaatcgtacttcacagattacgtaatcataaaatataaaacaaggattacaagcagttaggcagaaacataacaagcgcaagtggtttagtggtaaaattcaacgttgccatcgttgagcccctggttcgattcctggcttgcgcaggtttgttaatccgagatagtttagtggctagaatttccgcttgtcacgcgggagaccggggttcaattccccgtctcggagtgttttttattaacttgttttcttgctttcaattactacaattattgaacaatgttgactagttgttatattaatcgatagttttaattattctatattataaattacacaatttttttaaaaaagaaaactttttgaagagttaataagatcattttcatttttgagttcttttaatatattttcatctttaatatttaaagacaataattcatcatttgatattaacagttccgatcctgttaaactaaattttgtattttgttcttccatgtaaaggataacttttttagcaacttcctttaaatcatcccttaatgccaatcttctaaataaaagtttcatccaaactctctttttcttataattaatttcatcattagaatttgaaataattatatcattatatccattttcaaaactttcgaatgtgttaattaactcaattaaatcaatgtatatttttgatgtaaattctacaatggcagaatttggacgttgtttagtttcttcatttttaatttccatatcatcatcatcatttgaattacttgtaaagtccacattttttatttcaaaagatgacaaagaaatgaaattgatcaaatctgttaaagatactgacttattaacaatgatattattccatattcttttcacatcttctatgaaataaaataagttattattcaccatataatctgattcccataggaaatgttcatttccattagtagaagaaaatcctaaatttaataaagtgttgaaaattgaactttgtattgaatttaaagttaaaatattgttgaactgtttaaaattctcattattaccaaatgcaacaagattagataatttaccaatacttgcttgtaaatttctatcaaaaatattttcacccaccgtgttatttaaataattagctaattttgtagaagcggtagagaattgttttatctttatatcataaatccaaccaaatttattataattaatatcagttgataaaaatttttcaaggtattcagaatatctatcaaaacaagtcatcatgatattaatcttatcattttgaatataatatttgaaaagagattctgcaaattcatattgataaatattcatataattatcaaattcattatcaacatcagtaatataatttgcatattcaatatcagtaaattcattttgctcaaacaaattttgaaccatttctctcttactttctaataatgatgataaactttgaaggtcattatattttgttactaatggaattatatctgattgtttattaagtataataaaaatgaaaatccatttatctttatttttcaataataattcagatgaacgagttgaatcatttttgttaattttagaaaattcaacaatttcattagttgtgtaatataggaaacatgataaacctaataaaatttcattatatttatcagtaatttcaatttcagataaaccatcttgtaaagaataaatattttgtgtaacggaattaatatcaattaaaaattggaaatgatcaatgaaaatagtggagaatttatcggaaccaatactattttttatttcatcatcaattttgacaaatgcatctataagaagatatctcattattgaagaaagttcaattatttgttcattacttccatttttaagaacatgagaacaataatttgcaattaggattactatttcctttgttttatcttgtaagaaagtttcaaatgagaatgaatagtacatttcctttaagattgatttcaattcattttcaagactattatttgcaattaattcatagaatttagcacttaatgagataagttcacatgcatttaaaagtttagtactcatttcattatcatttgaaatattgtagtttaatgaggcataattcaataaatttttaatacattgaaatctattttgtaaattttgttcaatgaagatttgtgaagtaattataaatttagatttattttctaagagatcatctaatatatcatttaatgcaattttaatttctgattcagagaatgaattatcagttttctttaaattataatcaactaaggcattaagtagaatttgaaaattgtaagaattggtttatatgattttttaaatagaaaacattatccaagttatcaccaactgtatttattttcaatgtgaaaactcccttattgcaagatagataaaataaactttcattaaaattatcttgaacaaatgagaaaacatttaaatcatcatttaataaaataacttcataccaacaatttctaacttcaagattcttacgtgttaagataattttattatcattcttaataacgaatgcatctaatttatcaattgaaaataattttgattgaaagtaagtagtattaagttcattactggcattatcaagaatagatggaatatgatttctatgaagtaaatttattgaattattatttgaattaatgtctaattgatatctataatttttaaaagattttccattaatattgaatattaaaacatcgagataattgtttaataatgaaagttcacaatcaataaaattcaattgatccccattagaatcaattgaatctaaatcaaatgaattattaattgtaaaagttgaactaccctttaaatgatttaagaaagtaattttaccattagattctaaaactaataaaattttcaaaactggtgatacattaaaaattttcattgaaatgatacgatttgaattttcatattctctaatactataagatttagataaaattgaacttataattggtctattattataaatttgatttgaattaattgataaatcaccaaatttatccttaactgaaacatgaataattctcttttgagatgttaaaatgatgaaactatcattatcgaaaaatttaatattcagttaaaaattctgcattgtaaatttgaattttatcaattaatttgttttgtaagatacttaatgaaggtgataatttaattgattcaaaatattgtaaattacctgataatggatcaattataattaaatcaggttttaaaggttttaaaggatttggaataatagtacacaagggtaataaaccatattgattaattttataatcatattcaaatgcatagatattattttcattattaattgtactattttggaaatcaaatactaaaattcttaaatttgaaattaaaattgcaattgaatcagtggcaacttttaaggataatattttttcattttcaattaatttaggtaatgcattaattttgacagaactaagactataatgagagttatttagtacagtttgacattgtgaattatcattgtctatatcaatatcaacattgacattgtacattaacattaacattaatatccttaactgaatcattggaagatggtgtttgaataccattaccaaacctagtagcagtgaacgtgaatgttatccattctaccgtgacttttctacccactaaagaagctattctaccactaaaccagtcaacaaataagtaaaaatggtatattaacattaacattaacatcaacattaataaacatgttacgtaacttatttttcccacaaaaatttttttttttcattttcattttcatgaaatttttttactttactttactttactttaatacttcatttcttagtaacaatagaccaattaccaatatgattagatcaactaaacctaagaccgctcgttccaagagagcagttgaaaagaaagagagtaaaattgttgaaaatactaaaactgcacttttcattccaggtaataattcaaataaagcattacatgatataacaattgatttaagttcattaaagaaaccttttattaaacgtttcacaaagaaaaataatatattaccatttgaagatacaacaagtttagaatttttaagtgaaaaaaatgatgcatcattattaattttatcaacaaataataagaaaagaccaaataatttaacatttattagaacttttgattataaaatttatgatatgattgaattacaagttttaaatgattttaaattatttcaagattttaaaaaaatgactttccaagttggtttaaaacctttatttacatttcaaggtcatattttcgatattaatccaacttttattcaaattaaatcattatttttagatatgtttcatggtgaacaatctaatttacaagatgttgcaggtttacaatatgttatatcaatttctgcaattgaagaagatgataatgatgttttaatatctaaattaccattaatttattttagaatatataaattgaaaactttaaaatcaaatgaaccaaaattagctagaattgaacttgaagaaactggtccaagattaaattttaaaataggtagaattcatcatgttgatcctgaaatggagaaagaagcattgaaaattccaaaacaattacaatcaaaggaaaggaaaaatattcaaactgattcacttggtgatcaagttgctaaaattcatgttggtactcaagatttaagtagattacaaactagaaagatgaaaggtttaaaaagtagatatgatcaagtaaattctgatgatgaaaatgatgaaattgataatgatgaagatgatgaagaagaatttgttgatgctataagtggaaatgaagatgaagatgaagatgaagatgaagatgaagaagaggacaaacctgcaacaaagaagagaaaattataatttattcaaactcttacacttacacttatatctatcactttttacgtataggtatataattttttactaaatattatttaattaaatttgtagctaatagaatttttcagtataaacacttgaaccatcagttggatctttaacatctgttaaaaatgatgaaactggatttggtcccttaaagaaacaatatttctctaataaatctttataactttcagattcaatactattatccccattaccaattaattgattattatcaatacctttaggtgtactatcctttgaattaatgaaaacttcccttaaattttgtttcccattattattattattttcattaatattattattttcattaattttattaattttattatcttgtaatgtactattaccactaatagtatcatattcttgataatattgattattcttatcatcgggtatatttatatttaaacttggtatattatctttaatatccgttaaacttatagatgttggattcttatcaccattattatccttaattaaaaatttaggtgatgatatcattgctttaatattattacgcatatcaaaacttcttgatcttttaattttaacattagaattgttgattgatttagggaaataagaattatctcctttcttagtttgatttttatccttatttataattaaattttcttttgattttgatggagttggtgaacttagatattgttcggtattattatattattattattattattattatcattatcattatttaacatttttgtattgaaaaattttaatgtataatttttcctattattattatcccaataatcttgaccattacatgaaaatttaacacaaaaattaattattggattaatattaaaacttgtaggatttgatttaaaatatgatgttaataaaattggagttgataattggaaaataaaacgatcataacctgcctttttcagtactcttggtatatctgaagtatattttgcaattacattaataatagttttccaattatcaacagtatatctaattttaacagattttgtaaaacttaaatttttaacagctatttgtccaataattaaagttttatctaaatttaagaaaactctttcaaggaaaacaggtacttcacaatcaattttatcacgataagaaattgtttgaaaatcagataaatctaaattccaatttttaattgcatttttaaatttttctaatttccttggattttcactttcaatatattttttacatgatttaaataatttatcatgataataatttgaatctaagacaacattattagtaaatccaaaataattaatattattagatctaattgtatcatcatcatcatcatcatcatcatcatcatcatcatactcatcatcactatccgatcttaatttgatattttcatcactataataatcatcatcatcctcatcgtgcagttgttcagtttctgaattaaatggagaattatcggcactaattgaatttggtttatccttttccttaaaatatttaacattaatattattaccaaaatgaacttgtttataagttggagttgttggcattgatacagcacctgatgatttaaatgaactatttaattttaatgaagatttaaccaattcacctgattttttcctaactaatggataatgataattattttcattatcgatattatttgatgtatcaagattaatattggaaattgaaactaatggagaaacaggagattcaggagattcaatagttttatcaatatttgaattattataattataattatcaaattttttagaatttatcagagtattttgtttaattattttttgaatatcaatacctgaatccatacttgaactccttgaaggtttttttaaaaatgaaagtgataatggtaaactatcatcatctgaaattgaattaaatttattatatccaatctttgtattgttattatcctttcccaatgttagattagtatttttagttaaacaatttttactctcattatcatcatcatcatcattatcatcatcattatcaattgaattattcaattgattattattttgataatcgatatttaaatctgacagttgtctaccaattgatgataattcattatttgattgataaggagatatagagtccgaattaattaatttattatcatttggaattatattgatattattatcatttgattgagagcgtttaactcttgtaactggagcatatggcataacgatgtattcaatttatgtaactctaagggtatcaattataagataagtatgtatttccctgacaattgtgattggaaattatctccgaaaagataacaattagaaattaaatgaatataggatagtatatagtatataacagtatataatatatatatataagaccagtctaagagcacactactactttacttaccaattctatctctcttttagacactgaaaggaagataaagaggtactgtaatatatacttgataatactgggttttaagttaataaaataaggtgatgaatttttaaatggaaattaccgttcttgcctatttgggaagtattcttattcttatatgttgtcttttctttaagaataacaaggttaatgaccactaatgacagtgaaactggtttaatacatagaaatggatataattattcactttggaatatctgggtagcttcaacattacttaaaatattattattcccaacattaccttcacatgattttaatgtttatagaaattggatttcaattacaaatttaattccattgaaagattggtataatgaaacattatcaccatacccattgaaatgttcaccattttttgcatatttccaatggattttatcaaaaatttctcaatatttaatcatatcagataataatgataatagtatgaaaataattatatttcaaagaagtacagttataatatctgaaatattgttatttttggcattacaatggtttattgatatttccaagaataataaagaaaagagaagaaattttgtaatttctgcatcaattgttttatcacctggattattcataattgatcatataaattaccaatttaatggatttttattcggtattttaattttatcattaattaatgcaaaattaggtaattatttaaaatgttcattttggtttactatattaatatgttttaaatcaaattttatatttatttcacctgcttatttaacatttttaatttcatcatattgtttaaatccaataattaagaaaaaaaacttattgggattataaattgaaagatataataaatattattaattggataaatttaataaaattatcaataactattttattagttttaacaattgcatttataccatttatatattatggagttataaatgatattttcaatagattatttgataattcacaattagagataactaataattattgggcaccaaatgtatgggcattatattcatttactgataaattattaattttattaaatgaaaaattaccaattttaaataaattattctctattaaattattctccaaataagcaatttaaaatattaccaaatattgaaaatagacatacatttttacttataattttttatcaaataatgtcaataattccaataatttttcaaccaaattttgaaagattagttggtagtatatcattatgtggatattcatattaccttttcggatggcatatagaggaaaaatttataatgatgattataataccattaacatttgtaatttgtcaagatagaagattattaccatcatttcaattattaacatcatcaggatatatttcattattcccaattttaaaaggatcaaatgaatggatgtttaaaagtttaataacatttgtttggtttattgtttttcaaacaagttttagtgaagttacacatttttcaagaataattaatattaatacaagggtaattgttttagatagattaaatttaatttacatgttattatttgcaccattatgtattataattcaattaattaatattttaatcttgatttaattttgatttaaattatatttggttaattgtttatagtatttattgttcatttggtgttatatcatcatggtcatcaatttcatggctttatttccttgatgatccaatatggattggtaaagattgatattacgtaaggtcttttttgtataataatcctattataatcctatattatcattattgagtattatcttatcacttactcttcttaagacaagaacaatgtcaagagcatcaaagattacattagtactaagtactgcactttcaattacgacaatcggtgcagtttatttcatggcagagaatgaaaaagatgtaagtaatgtcattttaggttttatggaaatttatactaacatatagataaaatatcattatagcaattacaagagggaccaattaaggatagacaaagattagagagacgtgaatttaatagtaaacaacaagctaatttaaatgaatatgagaaacaaaaggaaatatttgcagaaatggagaaaattcaaccattaactggtgaaattgttcaaggtattgatactaggaaatagtgaagtatagtatagtatagatgtataataaaccagccaatcatataacaaattcattcaaccgacactttaaatgaataattgcggttataaagtgaaattcgctgtatagtaattatacccttttattatgatgattgtctttataatgaagtaacagtactttcaattagtatagtatagtatagtatagtatgtctttatcttcaattagtaaaacattaattagaaatatgagttctaagacaacacaaattatttccaaaaatgcaccacctgcagctgcaagttattcacatgcaattaaggcaaatggttttatttatgttagtggacaaattccatatacaaaagaaggtaaaccaattgaaggtgattttaaagttaaatcagatcaagttattaaaaatgttttagaaattattaaagattcaaattcaaaattagagaatattgttaaatgtaatattttccttaaagatatgaataattttaaagaatttaatgaagtttatagtaaatattttaatgattataaacctgctagatcatgtgttgcagttgctgatttaccattaggtgttgatgttgaaatggaagttattgcagttgaaaattaatacacagtacgaagtacgtagtacgtagtactgttatttacaaattatatagctattgtataattgtaatacaattataatcctatgttaattgtaagttaattgtaatatactctatagataagataaagataaagataataaaccaagtacaaaccctcgcacgtgacaaacagcagggcatgtattacataatcacaaacactaataaaaataaaaattactaataaaaaatcatccgcgtctctcttcacttagtaaaatactatactactaataaaagacagtcacagagaaaaatagagagcgagagaaagaataattcttcaatatgagaaaaatgaaaaaaattaattgaaaatttagttatcatagtaattgaaagttaatagaaagattttaacttttatcttttcaaaagtaaccttcattacatagacaaaatggctcaaagagttaccttcagaagaagaaatccatgtatgtattagttcaaatgattattgtatttatattagaatattagaataataaattagtgaaaaataatgaaattaatgaaattaggaataatatcaatatcaagataataatgtagacatatattacaagaatattaaattttgaaattagaatcattaaagaatataatgttaattacaaatcatatacgaataaaagaatactatcatatcatatcataaattattatactattattctaatatcaatagaaaaaaaacaaaatactaacataccaatcccttcatctatttatattattacagataacaccaagtcaaatcaaattaaggttgttaaaactccaggtggtagattagttgcacaacatattaaaaaacaagcaactagaccaaaatgtggtgattgtggttgttcattatcaggtgttgcaactttaagaccaagagcttatgcatcaatttctaaaactcaaaaaactgtttcaagagcttatggtggttcaagatgtgctaattgtgttaaggaaagaattgttagagctttccttattgaagaacaaaaaattgttaaaaaagttttaaaagattctgcttcaaaggcaaagaaataaataaatttataagtttatactactttatataataattaattattgaattaattgctaatttatcatttaatttaattaaatttgcaaaatcaatatttaatggactattaggttcttgattattaagtaaataaattattgctaaaattgaatattctaatgtccaaattggtgaccaattatcagttttcaaaatatctaaacaaatttcaccagttttaaaatctatattacaatgaggtatttgataagttatttgttcatctatttgactctcatttgttataaatttaattattggaggtgttaatggatatgtattggataatttaattgataatttataaaaacctttttataaattgtttcaattggattaattattgcaatccaatcaaataaattattatcatctatggggttaagtgaaattattgattcagataatttattatttggattggaatatttcttaaattctttaagtaatctcttttgtgcatttgacataactggctggatctataatacatttaaaagtaagatctatagggacagaatatcaaacattattatcatgatatgtgataacataatctattatagattcaccagccgcaaacagagcgtacaatgtggctggtgagggtattccttcatactattctatctttaagataatgatagtaagagtaacttatgatgatagtaagatacatatgatagatcatatcttatatcttatcagttataatcaaacttacattatgcagatcttataaatattataaaataaaaacatcttttcttatcttatcttatcttatcttatcgtgatgtcaaaaaaatatctttatctttatttttatttttatttttgtttatcttgtttatcttcttttgtttatttacttacttactctttcttctctacttctatcatacaaagatgataaaatacggcaatagaataacaaaaacaattaatttccccaatcataaccaatacaggaaattaacaacagagatagaaatacttggaaagaataataaatccaagactatccccaataccaataccaatatcaaatacaaagatcttaacagtgatagagtcaataacacctggcatatcaatagaaacacactctatttagacatattgtttaataacagtaacagtttccttattgagccttacaaatcgtcccgtcgccgctgcttaggtaataactaatattatacagccattatctattgtttcttattaattgaatgaatgaatgaattggtgtagtagttagctagatagttatagtatatataagtaattatataataataatcatatagtatattagactaagacatatactaatgtctttccatactgaccaaaggttttcttctaataatttatctgcttcttttaataacagtacaattaataatattaataataatacaaataataataataataataatataactaaaccttcacattcatcttattcatttcataataatatgtttaataataataataataacaatattaataataatgtcaataataatataattacaaatccaataattaatagaaatcattcagcatcagtttcatcatcttatacatcaactacttcaccttcaaattttacttcttattcttataatagtccatctgctttacctccaactcatttatctaattttcatagaaattcattatcttcacgttctggttcatttgataattttaataatattattaataataataataataatatcaataataataactttccatcctctaatagtataccgataaatgtcaataataccactacctaccgaacaatagtttaagttcaagtgtaagttcatcatacaacaacaacaacaacaataataataataatacattatttaatcaaaattcttcatcttttatgtcatcatcattaactcccgctggtcgtcgaagtttattgacatcaaaacttcaacaacaaaatcaacaatctttacctaatgataatttatttcgaaaaacttcaaataattcaattaatagtcaacatgggaataattcattttataataatttaaattcttatacacaaaaattacctcaacttcatccatcaaataataataataataataataataataacattattaattttaataataatataagttcaagtattggatcaaataataataataataataataatcaaattcctataccaattaatactaacccaaatgatgcatttttcacaactccttatccaacacctgcaactgcaacaactaatttatcaaaagatttagcattttcaacaaattcaagtagttcaaccctttatcaagatgcacaatcaaatattataatagaaaataatactaatactacagatccaactaatcatcaatttatatctgtttctgcacctgcacattctaatcctaattttcatactaatcatcaagtaaataaccatagcacaacacatattgaacaagaatcaaaaccaattacatcatcatcgagtgatcatttaaatatagctgattatccagttgatgaattattacaaatgttaagtgcattattacaaaaaattgttgaagctaatgatttattacataaagataataataacagtcatcatcataataatcataataccactaatttcacacaaaatgatgaaggtacaggattattaaatagtaaatataatgcaaatgttttatcatttcatggtagaaatgtacctgcaatttcattatatgcatatcttagtagaattttaaaatattgtccagttacaaatgatgttttcttaagtttattagtttattttgatagaattgctaaaagagcaaataataataataaaactaatgaagattcaattatggaaggtgataatgaattagataattctcatgaacaaatatttgtaatggatagttataatattcatagattaattatttcaggtataacaattgcatcaaaatttttcagtgatattttttataaaaattcaagatatgcaaaagttggtggtttaccattagatgaattaaatcatttagaattacaatttttattattattagatttccaattaatgatacaagttgaagaattagagaaatatggtgatttattacttaaattttggaaaagagaacattcatagtgtatattacgtaattaaatataaatactttttttttaatttttaatttttcttcatgtagggtttgtattatattattaatatactgtttgttcattagggcaacaatcatggctaagaaatcaaagagtcaaaagaacaagagtaagaataataataggaataatggtaccaccaattctactactacaataatcaatgaatttgcaaatatgaaaaatattgaagaatctgaagataatgaagataatttagaattacgtcgaaatttgaaaaaacttatatcaaatatgaatgataatcaattaattaaatgtatgaatgatttacgtgatggtaattttcaaactgaaaaatttttagaaattatggaagaaatattaattaatgaaaataaggaagaggaagaggaacaagagagagataataataataatgaacgtataatagaatattatgaaaatgaagaaagtagtagtcttgacaatgggaacgataatgatgatttggatgatgatgaaataattgatgaagaatttagtattgatttagaattatcaaataatttctttgatccatataaatttcatgatacattatttaaaattttacaaatacgaccttatccaacaaataatgaaagaatttataaattatttattttaatggcaacattatgtgatccatatacacaacctttagatacaggtttaaataatgaaatgattttaagtgcagatttagtttctgatttaataatttcaattataattaatgaatataagaaagataaagattcaattaatttatcatttgaaattagttatgatattgcatttataattgaaaaaattatgaaattacttaattgtgataatgaaaatttattatcaaatattaaagaatgatgaattaaattgggaaaatgaattaattaaatggttaccacataaatctttttcaaatttaattaatataacaagtgatttccatcatttaatgttattatatacaatttcaacaattggatttttaataattgaaaaattatttagaaaaataacaaataataatatttgtcttaatccatttctttcattttttttacaaatttggaaaaatcaaacaagaataatttatctttgtattgaaattgatagaagggatgaaattaatggattcccaggttatcctgaagttattagatttataattaaaggttcatcatcaattagatcaatgatttcattaattttaaataatgattttaataaaagattacatgatttaaaacatgaatcattaattaattttatgcgtccatggggtcgtaaattttcaaatggttcaattaataaagatattagaattttcattgcagctttattagcattaggatctgatttagatagtgtaactgaattattatttaattttgatcctgatgatagatatgatgaagatattaaatatatgtttgaaattgaattagattatatggatagtgaagggaataaagatgagaataatagagaatgaataagagaataattataataaacatcataaagaaggtattaaatattttggtaagaatagaattttagaaattgagagacatgatgaagaaattgatgatgatgaagtaattaatgatgaatggaataatatcaataaaaataataataataatgatgatgatagagataataatattaattatgatttacatcctgattgtaattgtgtatttgaagattttgaaagtgattatgatgaagaggaggaaggggtggaaggggaagaagaattaagaaatgataatttatcaacaattaatgaaatggaaatgattaaacatttaagtcaattagatttagagaatttaaatattgatgaaattaaatcacttcatttagaattagttaggaatataaataatggaccacctgcaattcgttctaaaaattataaccaaaatgagggttatgaagaagaagaagaagataatgatgataatgattggagggatataccaagaggtgataatattttactaacacaggaatttattgaattattaaaattatcaatggaagattccaatatatttattacaccaattgataatttaatcaaagcattaaagaaaatgacagaaaagacattaaataatgaaatttgtgaaaaaattattagaagtattgcatgggttgttcaatatgagaatgaaagtttaattatgaataaagatgatgaagcaattaaaaatagtgatccaaatattaatagtgatgttatttataattttttaaaaaatgatgataattttattaaaatgattaaatttaatccattatcatcattttcaataattgatgaattattaatggcatcaggttatagaagagttttaatttggtttttaactcatttaccattaaatcaatggttaattaattatttccatgatttattaattggtaatagaggtaataataataataataataatgataatgatattaaatttagttttagtagaattggtaaattagaattaactaaaattgagaaaatgatgttattacatgaatttttatcaaatgcagttatatttttatcaagaggttcatcatatgaattagaggatataattaatgagaaggtaaataatacaaatgatgaattttcatcatttataactaatagatcaaatgcacaaaaattaattaaaataatttgtttaatgcttaaatcattagaaaaaaatggaattttaaatccaaatgataatgaatataaagttgaaattcaaacattattagttcaatgggttggagttggatttgtacctgaagcaagggaattattcttcagatattctacaaataatgatgatgaggagagtagtaaatcgaaaaccaaatcaaaaactaaatcaaaaactaaatctaaaactaaaacaaaggaaataattataagtaaagacaataaaattcataaattaattaaagaattgaaaaattttgattcagttgatattttcatgattatgttaaatattggtaaacattatttaattgatcaaaatatttgttttaatttcatgaaagatttaaatttattatcaaatatttacagtaatgaagaagatttaattaatgattgtaatgaaattttccaaccattaaacaatgcaattattaaaggtgatgaagaaagtgtaattgaaataagttattcaagtaaaatattagattctaacattggaattatttatgcaagacaattagttacaattttcacagagagtaacaatggagaggatagtgatgatgataagaagaaagttagggaagatttccatcaattaatgtgttcatggacccaaaatacggtagcaaagtaaaagtgtataatacgagttgtatagtaagtgttaataattacgtaatgagaaaatggcgatgattttcatctttatagggttcatgaaattttgaacatgaatttatacttataggtcctttatcatcacaagggcaaagattatgagtgttatatcagttgattgggagtataaatcatacagggtcaatgtaacacctaatacattattacgagatgtattaattgaatcatgtaaatattttaaaattgatcttagtaatgataattatgattatgaattagttaatttaaagggtaaatcattagatttaagtaattcaattagatttagtaatttagttcaaggttcacatgttgaaataaggaaatgtaatagtaatgataataatattttggttaatatacgtgcaaatgttagtattgaaaatggacagaattatgttattacacgtaaaattagtaataatattacaattaatgaatatttacaaaatattattatcgaagagattttaaagaatgatgaaaaatttgaaatgagtaaagtaaaatttattgttcaaattatgatgaaagttgtatctgatgaagaaatggataaaaaattaaaagatattggattaattcaaggtaattatggtattagaattatgattaaggatggagttaagaaaatggacaaaatgagagaggaggttaatccgaagacagaaaaagaaaaagaaaaagaaatcacaaatgaagatgttgtaatgaaagatgatgatattagtaatgacaatacagacataaatttaacaacggagaacaaatcgtcagttgatgtgattgatagttcgttacttgatgaaggcgaaaaaggaggagaagaaaagaagatgcgaaatttaccaagactataattagatctgagaaacattttaaaattaataatgaatcagatgatgaaggtggtatttcagttgaacaattaaaagggtatcaaaaaatattaagtaaaagggcagaaaatgaaccattaatgactagatcaatgagggagaaaaaggctaaagagaaggaagaattaaagaattcatttattgaaattaaatttcgggttaaatttcctgataatgaaataattcaaataagtattgacaaaaatagagaattacgagaattaaggagaattttatttgaagatgttttaaatgaggaaatagttaataagattaaatctgataatgggaataaaatcaaatattcattaagtgaaatacatccagtataaggttattttcaataatgaaagtagggaagatgagatgagtattcaattgaaagatttaaaatttattaatcgagtatcattaatgtttaaaattgaaattgatgggaataagagtagtatagaaggaattaagtttgttaaaaatagtatattaccaattgatgatattaatagaagtaaaatgaatggaaataacgataatgatgataaaaaaaagattggtagtggcgtggtggaagaaggagaacaattaaaaattgataaaaatagtaataataaatttgaaaaatctattggaaagaaaaataacaagattgttcctagttggttaaaattaaataagaaataagtatacttcgcaagtgtacgagtataattgttgtcttttgtcagcatttcaggggaaattgatgcttaaatatgggcaatggtaattacaattttctctacagtctaagggaaattttgaaccctattatgttactgtataattgatctttaataacaagctaataagaacaaatgtcgttaaaataaataattggaccttaaactctgtaaactgtaaagaacctattattaaatttgtaacatgaaaaattaaggtgtcataaaattttgaatatctggttacgtaatcaactacatttataacttttcaaggagctttaaaatcagcattgattggaagtactacactttcttatactttttaaaatgaacattaatggtaccatatgaaagatgcaaacttttctctacaaaatatcttacgatcttctgtcaattgattttcaaaaaaaaagttatctttattttaagatttttttgtcaaaaagaagagcaaaatttaaatacatttaatggtgacatttctctgtaaaaacatttttaaacaatagaagatactaactatatgaagttactaacaaaaaggtttaaacctaaaaaagtttgagaaagggcaatttattgtattttattttctcttaataaggtaatattagtatcattgtaaagagatttatacgatctacactttaatacctcaatgggtatttgaaagaaacccaaataactgaaaactaaatgaggaatcttaaagaccgaggtaagtatatcttatgattctaatcaaattataggtatagtattaaccgtcttttagaggctaagtaatagaaaaggtatgagccgtttaaataatcggattattattaaacttcaaatggctataatttgatattattcaggaaatgtaaaataatcgcagcttttaagcgtcatattaatgtattatattaatgtggtattaaatagggtttataaggtttatagggtttattagtatttatattgttaactccgctttgaatctgaaatacgaaatacgaaatataatatacaatcaattaatgttccattaatggtaatactacgcgacattacgtaatccggtaatgaatttaatgaattaatatgacatattcgaactgtttttatttttcaccttttgaagttaccgagttccaacggaaattatcctcgtttctttttaatttccttctctttccttcttttttttccttctttaatatactcatcaattacgtccgttctttgttccttaattcgttgttacccccccttgaaaatttgtagttttatttttatataggttaccattatatattttgtactagttaaattcaatcaattggtaattaagtctgttcaattaaacttctcgtaaatatttgataattcgtatggttacaatataatattattaaatgaataattattatttgttaaattttattatgatattatactacctaatatctattagagtaacgaataaggaaacctcaacgttctcgtattaatcaatttacacgaaatactacatttgaacgttaatatttaacgttcccactgtaacgaatttgcaatagatctgatctattaaaagttgagatttgtgtaaattgtatatgacaattcggaaaaattacttaccgttaatattaggaatcaatcacgtcacttttcatgtaacaatagtaatattactataatagtaatatataatatgataaaaataacgtcatatattttaaatctcgtaaatatattacaactgttttacagccatgatattaataccgaaatgagtaaacgttatttaataccgttcatttccatctccggaagtcaatctcgtttctaaaaaagaaatttttcaagatctggaaatattttgtaaaccttatgttctttcgctcaacggttgttaatttcactattatttctgtttttcagtgcaacatttacgttgattgtaacaatccagttagattaatctactaagttgaacaattgagcaatcggttatatgacacaataattgtattatcaccttttcaatttaaaccgaattcatccaaaaatagtataattaaattaattataatttaatttaatttactttactgagccgatgtcgattgtctattcctgatccctattccctatttctattcaattctaattgttaattttagtttctaattgttaatttggaatattttaacttcttataaataccttgatacttccacaacatctttttgccttatctattcaattctataatttattttttattttttattttaatctattatctttctttcttttactatcagcaaattagtctaatacaagtttgaaaacaaatatattatgcgtttttcaactttttcattagcttcattagcattatcttggtcatcatcagttttagctgatttccaaggtagattatcttctgctaatcaaggttgttccatttctggtattcaatctgttaatggttattctgctaaattttattcttatacttatagtgatttaacttatactgatactaattattataatggtgcttatacaaaacctggtttaattacaactgttgcaaatgttccttctgctaatttcgttgcaaatgatggttatgcaacaactgcatctggtgaattatttggtgcagaaattccaattacaaattttgctcttgaattaactggttatttttacggtacgtattcatcattcttaaaatttgtcttctatcattaaaacattatactaacattttattacttcttcttttttttattttcattatagctgaaacaacaggtatttacacattcactatgaacaaagtagatgaagctgctatggtttggatgggtactggtggtttcgattgttgtaatccacaattaggtcaattaggtcaagcaaatcaagcaatcatgtttgcaagtaaagcttggaatgcagcttcagcttctcaacaatcttatgtttatttagaaggtggtaatatgtacccaattagaattgtttatattaatgcaatttctgatgcttcattaaatttcgatattgaagatccaagtggtgcaaaggctgatagttatgtttatcaattaagtggtgatattaaaggtggtcaatgttcttatgtttcaactactgcttcatggggttcaactactttctatgtaactgatttagttccaggtacaactgttactcaaccttattatgttactgatgaaaataatagtgttgaaacttttgttggtattactgttggtgttgattattctgttacttcaactgcaactgttacatctactggtaccgctactactccatatgtttcaactactacaactattgttcctggtaatggttcaactggtgctgaagttgtcgttattgattttgttcctcctttaccaactattacaactacttggactaataattttgttggtcaagctacaactactatgccatatactttacctgatggaacagttgttacaactgccgtcattttaattgaagaacctccattacaaactacttatacttattgggataaatcatcattttcaactggtacaactacaattgatcaaggttggagaacaattactgatgttattatttatgccccatcaatgtctgttgttacaactactggtaatgatgctcaaactcattcagcaactattttaactactattacaactaatggtgcaactattacttcatctgttttagaaattattttacctgctcttccaacaacaactattacttggaattcagcttacgcatctacttatactacaactatgacttcaacagttgatggtcaagaaaaaactttaactgaagttgtcgttaatcaaccaaaccaaaaaactatttatacaactgataatgttaattatcaacacactgcaacttcaacagatgttgtatttactgatgatgcaggtaaaattgaaactggtgatgttgtttatgtctataacagagttcttgcaacttcatatgattttaatgcagctaatacaggtattcaaactattacagcagtttcaactaataataatgttccaactactttcattgaaattcaaggtcctgcaattactaaaacttcaacaatgcaagctcctgtttacgttcaacaaacatcttactcacttgttactgatggtccaactccttattatgaacaacttatcttagttccatcttataaagttactgcttctcaatgggataaaaaatatacaagtttaagtactacattcactaatttaggttggacaacttcaacttatgttgttgaattagttccatcatattcacaatctgtttcatactggaatagagattatattagaacttcaacttttggttatacatttactgatgctttaggtgttcatacttcaacttatattcaagtttatgcaccaccaattccaactactacacaaacttggatgaaaacttttacttcaacttatacaactcttacaactaaattcgatgcaaatggtgatcatatcactacatctgaaattgtcgttgaagttcctgcaactgatgcaatcaaatcatggactacatcaactgtttttacaagtgattgtgatattaatgtcccaccttcaacaagttattcaacaactacaattggtggcgcggctacaacaattggtgtcgaaattattacaactggttcagattcatgttattatcctgtaactacttctgcttcaacatctgcttcaacatctgcttcaacatctgcttcaacatctgcatcaacatctgcatcaacatcttcaacaactactccattatccaccatcacctcaactgactcaaccacatgtggttcttcaacttacactactacctcagcatccaccttatctaatggtgttgtttcatccttcgtagtcgttgtcaaagaaactccagctgcttcatgtcaagctattgatccagcacaatattaccgttactattccagcaacttcatgtgcatccactagttataccaccacatcatcatcaactcttgaaaatggttctttaactacattcccagttcttgttgttgaaaccccagctgctacatgttctccattaagtactatcacttcaactgtttctactggttgtggttcatctacttacactactacctcaggttcaactttatccaacggtgttgtttcatcagtcgttgttgtcgttaaggaaaccccagctgcttcatgttcttcattatccactattacatcaactgattccactggttgtggttcatcaacatacactacaacttcagcttcaacattatctaatggtgttgtttcatcagttgtcgttattgttaaggaaaccccagctgcatcatgttcttcattatccactatcacttcaactgattccactggttgtggttcatcaacttacactactacttcagcttcaacattatctaatggtgttgtttcatcagtcgttgttgtcgttaaggaaaccccagctgcatcatgttcttcattatccactattacatcaactgattccactggttgtggctcatcgaacctacactactacttcagcttcaacattatctaatggtgttgtttcctctgtcgttgttgtcgttaaggaaactccagctgcttcatgttctccattatccaccatcacttcaaccgattctactgcattgtggctcatcaacttacaccactacctcagcttcaactttatctaacggtgttgtttcatcagttgtcgttgttgttaaggaaactccaactccaaactgtactccattaagtacttctacatctgttaattctagaacatgtggttcatcaacttacactactacaacatcaatgactctcattaatgattcagtctccacttacgttcttgttgttgaagaaactccagctccatcttgttccccattatctacctattacttcaaccgattcaactgattgtggttcatcaacttacactactacctcatcatccacattatctaatggtgttgtttcatctgtcgttgttgttgtcaaggaaactccaggtccaaactgtagtaatattgatccagcacacattacagttactattccagcatcttccttgtgcatctactagttacaccaccacatcatcatcaactcttgaaaatggttctgttactacattcccagttcttgttgttgaaaccccagctgctacatgttctccattaagtactatcacttcaactgtttctactggttgtggttcatctacttacaccactacctcaggttcaactttatctaacggtgttgtttcatctgttgtcgttgttgttaaggaaactccagctgcttcatgttctccattatctactattacctcaaccgattcaactacttgtggttcttctacatacactgttacttcagcatctactttacctaatggtgttgtctcctctgttgttgttgtcgttaaggaaaccccatctgcaatgtgtactccattataccactatcacttcaaccgattcaatctgattgtggttcatcaacttacactactaccttcatcatccacattatctaacggtgttgtttcatctgtcattgttgttgtcaaggaaactccaggtccaaactgtagtaatattgatccagcacatattactgttactattccagcatcttcctgtgcatctactagttacaccaccacatcatcatcaactcttgaaaatggttctgttactacattcccagttcttgttgttgaaactccagctgctacatgttctccattaagtcacctatcacttcaactgattctactgattgtggttcatctacttacactactactcttcagcttcaactttatctaacggtgttgtttcatctgtcgttgttgttgtcaaggaaactccaggtccaaactgtagtaatattgatccagcacacattacagttactattccagcatcttcttgtgcatctactagttacaccaccacatcatcatcaactcttgaaaatggttctgttaactacattcccagttcttgttgttgaaaccccagctgctacatgttctccattatccactgttacctcaattgactcaactacttgtggttcatcaacttacactaccactacctgaaactactcttccaaacggttctacttcatcagttgttattgttgttaaggaaactccagctgcaatgtgtcaaactgctagctacaccaccactattacatcaattttagcaacatgcggttccgccactactaccacctcacaaggtcttgttactggttcagatagtgcagtttctgcaattgaatatgttattgttgaatcaccagctgcttcatgttacagttctattgatccataccatttcactgttacacttccatctccaaactcagtctgtgcaactcaaactgttggtactacaactactgttattgttatcaatgaatcaactatcactactcaagcaattgttattgcaactccagctgcctcttgtttctctgcaactgaaactctcaacacaatcacttcaactgaatcaactggttgtggttcatctacattcactactacttcagcaactactttagctaatggttcagtttccaatgttgttgtcgttgtccaagaaactccagctccaacattgtaaccctaatgcatttactactactgaagttgcatttgattgtgaatttacatcatacactacattcattggtaccactgattactatggtaaatatattaacgctacattagttgttgttgaaacaccagctgctacatgtacctgaaattccaaccttaactactactattgatgcaactgattgtacatccactgaatacttaaccactgttgtctctgctggtgttaccgcatttttagaagttattgaaactccagctccttcatgtgctactgcatcaattgatccagaattcagaatttcagtcattacatcagctgctactgattgtgttgctacttcatacactcaaattgatgctgcagctactggtacaaccattgttgttttaactccagcaccaagttgttactcaacaactacttcagttgcacctgttgaaactacctcagttgcacctgttgaaactacttcaagtacacctgctgaaactatttcaactgattatgtcgaaaccacctcaacctcaactatttactgtactaaatgtcaccacactacattcaattcagctgttacaactgttactaatggtgttactattactaccacagtctgttatgaacaaactccaactgataatgctccagaatctactgcaactgtccaaactacttcaacttcaactatttactgtaccgcatgtcaccatactacattcaattcagctgttacaactgttactgatggtgttactgttactactactgtttgttatgaacaaactccagttgattcaacttcagaagctgttacaccagcaccaactggtccagctgctccaattgcctcaaccacaccaggttcaccagctcaagaatcaagtacatctgttactgctactacaacacctgcagcaccagttagtccaaattccccagaatctgaagctccacaaggtaatggtgtaacaagtacagtatacccaggtaacaatgattacacttcaacatcatatgtttcacaagaaacttcatctgcacaagtttcagtttataatggtgcagctaacaaggttggttccggttttgcaccaattgcaattatgttctttgctttaatgatttaaagttgataaataaaaataaaaaaaagatacgtttaattctcgatcattttattttaatttattttttttaatttcattttacttcaattcatttttgtatattttgttataaaatatactcctttcacagttgcattcttcttatattaaatatatataatacttttactgtataaaatttcacaatgtcttcgttgtgattaaaattaatttgttctcttttgttaaaatttttttatcgtaattaaaaaatagataaatcgtgtaatgaagtatttgaaacgtttaaatgtttgaatattaatttcttactatccttaactatacatataaattttcttactcttgtttattttaaaacaaaatcaatttatgaattcatatcaatataatggcaaaatataaatgaaaaaaagataatgtcttcttgaaataaatgattttaaattcaatttttattcaaatgtatcccatttaacttaaagtgatacattattacttggtgtaattgttgacccactattaaaaacacaaacaaaatgacaagagaactgtaagtgacttaaaaccaggacgtcgatgagactgaatgtaagtactgatacattgtagcctgatgaatcaaagatcataaaaagaagaaaacgtggatgtactctttacatcaaggcaatgtttttataatttgattagtgatcaaatagttatcattataataataataataataacaattatttctttgaaatagttcataaatcatgcaaattttttagctggttactatgatttattccgtatatattatatatgcaacttgaataaaaagaagttatcaaccattcccactatatatatatatatgattaccatagtgaatggcatatgctcaagagagaaatagaggttgattaccgttaccaagacaattaaattcttttggtattttgctgaaaaaaggaaagtgattatcaactttagctttttggtgttggaatacagattgatttataattagaaaagtacatatagtatttaacttagttattctactgattgtgataagtatatcgttttatgaagaaggatcaaaaatatatagagtgtagaaatgaaatcaaataaattttagttaacttcaaattaaaaatattttttgttacgtcattgaatgtatattgacatatttggttaatttctttttatagaataaatgcatgcaaaattaagttaattataagaataaaatattgatggataaacggttaatgacgtatatatatgtgcatgagatcaaaagggtttctttcaacaaaattagcttttttttgaaagaaaacgtatagaacaacgaaataggcttttaagtaatagagatagagggcatatattttaaaaacttgacgtggatcagcattatacattcaataagaagaaggaagtttgcattcgtaaattttgagtgactaaatgtattttaagttatttctttccctaaaattactgatgattcaaaaatatgttaaagatccagacttgataatgaaaacaaatccaaatttaacccctagatctctgtctacaataaaaattaaaagcctgaatagataataaatatttaagcgttgattcatccttctccataaccttcctattgtgtaagctcccaataagtaggcagaaaatttaacagacagaaaatttcgatccttccgctaattttccagcttttaattaaagaacttactgattcgtttaatcgtacttatttacccactaaataaatattatcaacggttacaggtgtttcagtgctttaactacttgtggtagatgaaagtatattaagtaaatcatataggaacatctagtatcaaaatgtaaggtaatatacccagaagactgacataattataaattaattaatccaaatttggaaagaccccctcattttttttaaaaatttctttttcttttttttttctatttttagctattttccgcagtatagaattccatggaataaaaccttatttaattttactatggtaatttaatattttattacttattccgtgcattaaacgcttttattaatgcaggttaatatttaataattttcgttgatgtcatcaattttcaccttttttgttccatagtaatcaattacatcataataaaacctaaaaataaaaaacaaaaaccgttttaaaggtactttcccactcatatgaccaaataattccttccccgtgggctcgttgctaccctatagttcgcttagtattgccattctacatataaaatttttaaataactttgcagaaatatattaatttcactaagagacaatctattttgtttgaatttgaacaataactctattcaaaaattgttatctaaaccttctttttaactcatctttgtccttctcttttcttttttttctgcttgtggataattttaaactttctcagccaatggtcatgattatgattacagaatgaacccttgatcttgttattttctaaaaaaactccttttagcacggagttacttaaattatacattataattttatctaatataaacttcaatcatttaattttataaatattaactcaactgcactattcttattttattttatcattcttttacttactttattttatttctatccatattccatttcttctcttttcttttatcatcgaaagatataaaactattttaaaaccaatgcgtttttcaaccttttcattagcttcattagctatatcttggtcattaacagttttggctgacttccaaggtaaattaaattccgcaaatcgaggctgttctatatctggtattcaatcagttaatggttattcagctaatatttattcttatacactcagtgatttagcttatactaacacaaattattataatggtaattataaaaatccaggtttagttacaactgttccaaatgttgaaaatccaaattttgcaagaaatgaaggttttgcaactgctgcatctggcgaattatttggtgcagaaattccaattacaaattttgctcttgaattaactggttatttttatggtatgtgtcaataacaattactttttttctttaattataaaaaaacattttactaacattcacctcattatttattatagctgaaaatactggtatttatacatttacaatgaatgatgtcgatgaatctgctatggtttggatgggtacaggtggttttgattgttgtaatccacaagtaggtcaattaggtcaaagtaatcaagcaatcatgtttgcaagtaaagcttggaatgaagcttcagcttcacaagagtcttatgtttatttagaaggtggtaatatgtatccacttagaattgtttatattaatgcagtctcagattcttccttaaattttgatattaaagatccaagtggtgcaaatgctaataatcaagtttatcaattaagtggtgaaattcaaggtaatgaatgtaaatcagtttatgcaacaacaagtttttcatcatcaacctattataataccgatttaatgccaggtacaactgtttataaaccaatgacttacactaattctaataatgaaattgttacttatgttggtgttactattggtattgaatctgttgttcaaaccacttttacaagaacttcaacttggactaatacaattacttcaacaagtagtggtacaactgtatatgttaataatggtcaaacagatggtgcttacgttaatattgtctatgtccctgaattatctacttatacaactacttggacaaatggttatagaaatgttgttgaaactactatgccaattactttagatgatggtacagttgttactactcatattatgttagttgaagaacctgctttacaaactacctattcttattgggatagaacagattattcaactggttcaattacaattaatcaaggttggacaacagttactgaaattctagttgtaggtccttcattatctactattacaactaacggttataattcatttactgctactcgtaccgttccaactacaattactactaatggttcaacaattacaactactgttgctgaagtcatattacctgcattacatacaacttatattccatggacttcaaatggtagaactacttatacctcatctttaaccactactgatactaatggaacaccaacagaaacctgaaattgttattatccaaggtcctccaaagatgactatctatactgaagatccttcaaaaaattatttattcacatctactgctacaggtgtcgttgtcactaattcaaatggtaatgttgaaacatgatgatgttgtctatatctataacagacaacttcaaacttcatacttatttgattcaacacacactcaaattcaaactactactaaagagacaacaatgggtggtactaccagtacttatgttgaaattgaaggtccagcaattactgaaactactactatggaaggtccagtctatggaattacaacaaaaatgtcattaattaccactggtgctactccttattatgctgaagttgtcttagttccttcatattcaatatcatattcagaatggaataaaaaatatactggtactattacaactgcaaccaatatgggttggaccacatccacatattatattgaacaaattccatcacattcagaaactgttgtttattggaatagaccatatgctgaaactcatacatttacatcatcattaactgatggattaagtgtttatgcaactacttattacttctgttaatagaccagcaatttccacatcaactacaacatggttaaaatcatttactacaacttatacaactgttgaaactatcttcactggtaatattcatatcactacatcatgagatcattgttgaagttcctgctactgatccaatcagatcatggacaaccactaccattttcactgatgattgtgatatacaagccacatccaccagtttttcaactgaaactgtcagtggcgcagtcactacaattggtgtcgaatttgttaccactggttcaagtatctgttactacttgccatcttcaactacttcctcttcatcatctagtactacttctcaccatcatcctcttcaagtaccactttgaagaacaatcacttcaactgattcaacaacatgtggttcatcaacttatacaaccacttctgcatcaacattatctaatggttcagtatcctcaattgtcgtcgttgttgaagaaactccagctccatcatgtacttcttcatctttagctccatcctcatcaccatcttcatcatcaaccacatcctcagctccatccttcttatcaaccacatcattcagctcacatcctcagctccatcatcatcctcaacaactacttctttaaatcactattacatcaaccgattcaactgcttgtggttcatctacatacactaccatctcagcttcaactttatctaacggtgttgtctcttctagttgttatcgttgttaaggaactccagctccatcctgtacttcattaagtacctctacatctattgattctagaacatgtggttcatcaacatatactactacagcaccaattacattcattaatggttcagtttcaagttacgttcttgttgttgaagaaactccagctccatcatgtaatccattaaccactatcacttcaaccaattcatctgcttgtggttcatcaacttacactactacctcatcatctaccttgtccaatggtgttgtttcatctgtcattgttgttgttgaagaaacaccagcaccatcatgttcctcatcattatcatcaacagctcctttgaataccattacatctactgactccactacttgtgggtcatcaacttatactacaacttcagcttcaacattatctaatggtttagtttcatctgttgttattgttgttaaggaaaccccagctagatcatgtacttcatcatctttagctccatcattatcaccatcctcatcatcaaccacaacctcaactccatcatcagctccatcatcagctccatcatcagctccatccatcttcactccatcatcagctccatcatcagctccatcatcagctccatcatcagctccatcatcagctccatcatcagctccatcatcagctccatcatcagctccatcatcagcttccatcatcagcttccatcatcagttccatcatcagttccatcctcatcatcaaccactgttttgaataccgtcacatctactgactcaactgcatgtggttcatctacttacactacaacttcagcatctactttatccaatggttcagtatcctcagtcgttgttgtcgttgaagaaactccagctccatcatgtacctcatctgtttcagtcacttctattatcacttctactgttacatctcatgcatctacatgtggttcagaattaacttttacaacatcttcaatagttacagcatcaaatggctcagttcaaggtactgtttatgttgttgttgaagtaccagaaacttcatgtagctctgtcgatgcattccatacaactgttactattccagctactaatactgattgtacacctgaaacatttactacaacaactgtttttactattagtggatctgttatcacaaccccagctgttgttgttggaactccacctgcttcatgttattcttcaagtgaatcattatcttcatcatcttcatcagcatcattatcatcatcttctacaccactcaacacaattacttcaactgaatctactggttgtggctcagctacatatactaccacctcagcaactacattagctaatggttcagtttccaatgttgtcgtcgttgtccaagaaactccagccccaacttgtaaccctaatgcatttaccactactgaagttgcatttgattgtgaattcacatcttacactacattcattggtaccactgattactatggtaaatatattaatgctacattagttgttgttgaaactccagctgctacatgtaccgaaatcccaaccttaactactactattgatgcaactgattgtacatccactgaatacttaactactgttgtctctggtggcgttactgcattcttacaagttattgaaactccagctgcttcatgcttcacttcatcaatagatccaacacatgttatctctactattactaccgttgctaccgattgtgttgcaacccaaattactcaagttgatgaagttgcatctggtactactgttattgtttttactccagtttcaaactgtgaaattggaaccttatcaacttctgaaaatattccaattatttcatcaactactgatggttcttcaacaagcgcatctgctgaaactactttaacttcaagtgcatctgctgagactacttcaacttcaagtgcacctgctgaaactgcatcaacttcaagtgatcctgtcgaaactactccagcttcaactacatctactgaaactactccagcttcaactacatctactgaaaatactttaacatcaagtacacctgctgaaactatttcaactgattatgtcgaaaccacctcaacctcaactatttactgtactaaatgtcaccacactacattcaattcagctgttacaactgttaccaacggtgtcactgttaccaccacagtctgttatgaacaaacaccagttgataaccttccacaatctacttcaacttttgaacctacaacaacttcaactatttactgtaccgcatgtcatcatactacattcaattcagctgttacaactgttactgatggtgttactgttactactactgtttgttatgaacaaactccagttgattcaacatcagaatctattacaccagcaccaaccactccaattgctccagttaatccaactgccccagttaccccaactacaccaggttcaccagttcaagaatcaagtacaattggtactgcaactacatcagcaacaccagttagtccaaattcatcagatactgatgcaacttatgtcacattaccatcaaataccgtatacccaggtaataatgattacacttcaacatcatttgttccacaagcaagttcatctgcacaagtttcagtttataatggtgcagctaacaagattggttcaggttttgcaccaattacattaattttacttgcattcttgatttaaatttctaaatctggaattatttttttttttcattttcattttcattttcaatacactatttgcatttattctttaatttatcacataatacactgaaattatttatttcatcgtttattcattcaatcactttgtttaataatatttttcaattataattataattataattataattcggtttttaataaatttttttacatataattcccaatttgggctttctttttctaacattataacttttatattgatatcatttataatagacactttaattactattaatttaatcaattagttggtataatcttatcagctttaaactgatatcaaaaataacgacgcgcccatttccgagagaaaactgttacgtaaacaacgattagataaacaattaagtaattagcaacatgaaattatcagaaatcaaaacattgataaagaaacggatttccttttatagatttaacgataagaataagatcaatggtttccgatacgattaaagtatacgtacgttttagacctttgagaggggaacttctaaatgaagaaaatattgaattacatgatagtgaaattaataataataataataataaactcagaaatagatcaatttcacccaaacattttcaaataattaataattcaacaatcaatattcatccaataacatcacagaaaattccaaaattatctgggaatgaatataaaagaagtaataaccctgaaaatgtaaatacaagagaattaacatttaaatttgatgaatgttttcacatcaaatatttcacaatccgaattatataatcgtacaatattaccgatattaccatcatttcttcatggatataatataactataatatgttatggacaaacaggtagtgggaaaacatatactatgacaggaggagatgaatcctatagtgagaatgaaataggtataataccaagattatttaagagtatttttttggaaattgatgaatcaccagttacttatcaatatactattggattatcatattttgagatatataatgagagtataattgatttactgaatcccaaatctaattcaaaaaatatatttataagagagataattgatgataataatgagaataaagtatatgttgaaggattagagaaaatttatgttgcaagtgttgaagatgttcaaaatgtaattaagattggtaattcaaataaaactatagctgaaaccaatatgaatgataaaagttcaagaagtcatacaattttaagaattgaattaaatgttcaaaaagatgatataaataagaaagaaatttttaaaagtacattatttttagttgatttagcaggttctgaaagattaaataaatcaggtaataatttattaaaggaaacaattaatattaattcatcattatctgcattaagtaatgtaattaattcattaagtgagagagatggaaatcttcataataataataatacaaatcatataccatatagagattctaaattaactagaattttacaaaattctataggtggtaatgcaaaaactgcaattataattaattgttcatcagatagtgaagatttaaatgaaactatatcatcattaagatttgcacagagggctaaaaatgtatataatagtgcaataattaataaaattgaatatgaaaaaagagagtaaaagtgaggataatggtaatgataatgaggagaccaaaacgtggaaatccaaatatatcaatgcattgaagaagattgttcaattagagactgaacttgaatcaatgggtaataatgaaggtaagagtgataataataataataatactaataatattgatattaattatcaagaaatttgtcgattgagtaaggagaatattgaattaaagaatgagaatattaaacttaatgaaactattgaatatttaagggaaaataatgataattgtaatataattgatattaaaatatcattaactgaatcaattaggaaatttgaatcattaaaatcagatattgaaatttataaaaaattattagttagtaaaactgatcaaatattacaacttgaatctgataaattaaatgatatgaataattcaaaaatatataaggagatgactaatacaattcaattacagaatgattcattaattgaacaagttgagatagctgaacgtgaattaaggaataaacaagagaaaattcaagaagctatgaataaattaaatgataggaataatatagtaaacaatgaacaagaaaatgttgaaaataaattacaagagatgagtaaacgattaaataatatttcaaagaataaagttgttgaaattgatgatgaggtaaatgaagagaataataatactcctataaatcataaaattggaactggattgaatttaaatattataaaaccatgttaataacttggtaaatattaaatttaataagtaagtaagtacatatacatataatatatgttaataattaaaagctctttgaccatcttttaaacttagtatacatctaacatcacttgtaaatcttaaactattaagtaaaggtaataaattaattaattcattatcatcaggatcattaatccaaccttcaatcattaaaccattatctttatgacgtacaaaagaaattggtgaattatcaataattaatattttcgaataatctagcgttgattttgaaatatttgaatgaaatacttgaagttctcgatcttgtaggagtgtttatattttgtattgaattatcatctaataaaactgataaatctttaacataacctttaccttccatgaaaatacaagaatttctataatacctttttttaaaaattttcattggttgatttaatttagagtttttaatatattttttcattatatcattcatcaatacttgttcttcaaggtaatcaataacgggatctgcatattctttgattgaagctgtaaagcaaattaaatcaaaccattgataaacaattgataaaaattcttcaacatatggacgtttataaatatgatataaagttggtaaattacccattactttaacttcaattgatttaccctttaatttagaaattgttaaggaattatatcttgataatgaatgaatgagagtttcatctaaatcaagtactaaagttttctttgttaaattttttggaggatttgatatattaaaattaaataataattttgggaatataaattttttctttttctttgaagatgaagatgaagatgatttcttgatttgtttttgtttagatattggtttttctattttaggatcttctattggatttggtatatctaatggagatttaaaatcatcatcattatatgattcattctttgaattaaattccattgattcttctaaaattgttgaaattgaagatttaaatgaagaactagaaggaggagtttctaatattaaaggactagaattgggtattgatattgaatcatcaaaagtatcattaattgaaggaggagtataagtaaaataatagaaaatgtataataaaagataatgaaatttaataaatgggtaaattaaaattttaataatataataaattggataataaattaataattttggtataaaaatgattgtattgtatatagttaatagtattctgtgtattatactattattatgaggtttagtgttgatattatttttttgatctatcccagtatttaaagtattattatcaattatattattctcttcattattaatattaatattattatttaaattatccaaactacttcgcctatgaattgataataaaaaataattacgtaataatatattacataatcattattacataatcagtcacgtgacataaaaatacattacgtaataaataaatcacgtgacataaacagaaattacgtaataaatatatcacgtgaccattacgtaatcaataaaaatttaattttcactattaaataattaataatgaaaaaacctaccgcattaattaattatactttaagtgaaaatcttcaataaacgtttattttatattaatatatttattagatattagatttttataatcatcatataacaatgacaaatcctcatatatcaatttataatactaataatgttaaaattttagtagttgcagatattagaggtaatttatcttattttaatactttatctaaaattcataatcctgattttataattcatacaggtaattttggttttattgataatgaaagtatttctaaaattcatgaatcttatttacgtcatatagttgaattttcaccacttttatcaaaagatttaattttaaaaatttctcaattatcaaaagttcaaggtgattcagttcatcatttatcaaatgataatattaatttaaaatcaattttactaaattcaaatcaacaaattagtcaattaatggatttcattaatggtaataaaaatttaaatatccctgtttatactatttatggtatgtgtgaagattcaaatgttataaataaatttagaaatggtacttataaaattaataatttacatattattgatgattataatttacattcaataaaatttaataatggtttcacagtctatcttattaggcaggaataggtggttcattatcttatcataaattatttcatcaaggtacttcaaataatataatacctttatcttcaattataccaatttctggtgatcctggtaatatttggataactatgcttcaattgggtaaattatttcattcccttttggaatattctgaaaataatccaaatgaatataataaatcaattaaaatcttagttactcatcaatcaccaacaagagaaccattattagaacatttatcaatattctttaaattcgattatactatatcaaattcccttcattttaaatatatttcatcatttaatgatttaacaataaatacatcatttgaaacatttcaagattaaattctcagattcaagattaaaattattgaaaatttggattaaaattcagaaaaaatatgaaaaattattatcacaatttaataattatcaattagcaagttatattcatttagctttatcaatttatgataaaataccaatttcaaaatcatcatcatcatcatcatcaacggataatactgatgaaaatatttcattatcattatccccttcattgattaattcaattcaatcttcaaattttaataatttattaaatttattatcaaaacatgaattaaatcaaattatacgacatattaatgatttatattatgtttcatttcaaaattgttggcattataatatttgtgatgttgaaaatggttatcttttattaaattataatttacaaaataataaattttcaatgaatacttattctgaaggtttcgattttagttatagattcgaagctacatgagaaataattatttttttttgattttttttttaattttattacattacacattattaatgataactagctaagacttattcttttgatgtagctccccaatatctgttaccatatcagggtctaagcactctcatcaaaagaattttaaaattattaaattattattaaagtggagttaccagctccgttctgaaattttattactgtcaaatataatcttccgtcctttaatttcataattcataattctaaggggggtttcctttttaaaaaatctgttcatcattatctattctattcatcatcatcatcatcatcaatcaattatcatcatttactaccttatcataatcatcatcactttcatcattctcagtaccatcttatttctcaccatgtttttgaatcaaattcttcttttcaattcgtttttctttattatttattattttatttgttgaattaaattcttcttttcaattcttttttctttttattatttgttgaatcaaattcttcttttcaattcattttcattcaattattttattatttagcaatgaaggggggtctcttttttttctatttttttaatacttttatactttttttttcttttttatttttttttcttaataacaataacaaatacaataacaaatacaataacaaatattttaattaactttatttttaagttgattcattctactaattcttcttttattaattaacatctcaatctctttctcatatgctcttcttattttttcttttaaataattatatctattaattgacattaaaattgaattttcattaataaattcataataaaataaatcatatgtgaaaaaatgtgaataataatttaattctttatccctttcaacatatgattcaaataaataccaaagttgacacataaatctatctcttgcaattaaataaatcatcttggcattatatgtactcttattttgtaattcaataaaatatttaataattttttttccatcatttgaataatttctggaatattttaaataataatgatataaaaattgagcaatatgatattttaaaccatcatcttccttaaattcttccataaataatggtataaccttatttgttaattcacctttcttcttctcttctctaatttcatctgatactttattaccaacataaaatttattatacatattattaagcttcttcctattcataattggataaactattttataaatttcatttaattttgattctaaattaattaataattttgactcactaccttctttaataaaatgttcatttcctggaattaaaaatcctaaaaaatcaacaaattcaattccaattgtctcatcaatcctaacattcattaattgtcttaaatcttttgaaattaaattaagtattttatgagaattttcaatttgaatcataccaataaatttacgtggtggtggtggttcaagtttcccagttcttctcttaaaatcttcaatataatcttctactgaattttcaatttttttaatacctttcttatatttcaattgtaatttatttggctttttatatttattcttttttgctttggcaattttagctaaaaaatctttattattgaaatcattagcattaattggatatgcatatggtaatttatttgttggattggaattattaatggaacgacttggtgaggaattgatatttgttaataaattcaaaattaatatttctatttggattagtaggtgttgaaggtaagttagtaaatgttgatgttggattaataatgtttctaatggaattaaatttagaatcaaaatcagaatgaaatttattattatcatcagttgaagtgtttgttgaattgtttcttgcattttctaaaatttcatatgtatcaaaacaagttgtagtagcaacagggttagtaattaaatcaggtgaaattaaattaatatcatcatcagttgaatcagttgaatcatcatagcattggaactaccagcaataataccatcagcaataccaccaacaatacctatcagtagcaccatcagtaacacctcagcaataccttcagcaataccattagcaataccatcagcaataccattcagcaataccaccagcaataccaccagtaacaccaccagcaatagcatcttcagcaatagcaccttcagcaataacacctttaacaatagcaccttcagcaacaacaacatcagtaacaccactagcaccattaccaatttcatcattaccaacaatactaccattaccaacattaccaacaacatcaccattaccaataccatcattaccaacaatagcaccattaccagcattaccagcatttaaaccatcattagcaatatcattttcagtagcaattttatcattagtagcaattttatcattagtagcaattttatcattagtagcaatttcatcatcatcaacatcagtattactatcatattgactttcagtttcagtttcaatttcagtatcagaatcatcaacatcacgtaaaagacgacgatcataatcaagtggaatatttggtgctttcaataggaattgaccaattttcaggaaccggctttgcatcaagaattgaatcataaattggtagtttaacatttttgactaataaaggttcaggttcaacaaaaacattatattcatcaacaaacttaacattattattaattttttggaaatcctttgattttaattcttcaggttcaaaaagtttaacatctaataaatttgaatgagttaatgaattgataatatcattgaatccattataatctttaccagcaatacaattttgttgaaatttattaaatttagaagcagcattcataattggtggattcattgaattattaataagttaaaatatcagcagtaatagttctcttaattgatttataactataatttaattcttcaggaacaatcatagcagaaaaattaaaaccagtattggaaattttaataccatgagaacaatcatatcttgtattatcattatttcttggagaagtttcaataattgtagttggattataatgcaattcaaaaccaattttagattccttgtaaattttgtataattcttttgaagggttaacatattgatgcataattttattgacaatcttatttgaaattgattgtcttaataatggaggacatggaattgcccaaccagttctaactgaaattccatttttatcatcaaatctaaaataattaacatgacatttactaccaaaggtatcaacagctgccttgtaaaattgagtttttaaactgttttcagttaattaaatattcatgtaaccaatctgaatgatataatttattaatagttttacattctttcatatgatgttcaataatatctttaatacattctaatcttaaagttggattttgtttcttattagtaagaaacatgaaatcataagcatgtaataatttttcaggaatttcaattttgataattggttttaatttataatttttatcagtttttctaattcttgactttaattggtgaaatattagaattaatagttgatggtgaattaaattgatgattttgataagtatggattatatccattaaaagtggatggagttgataaaatagttctaccattaacaccaataaatcttggagatctaataggtgttgaaagaatagaattttcatcaattgattgatttgggttgacagaatagacaggtttagatttaatagattttttaacagattttaaaggagtaacaggggtttggttgacagatttaatttttttttggttttgtttaacttttggtgagtaagttttaacagtttggtaagatctaaatgatagatcttcataatttgttaaactaatattattagtttgtaaattattagaagttgaggtctcaatttcttgacatttgaaattgtagagagtatctttcttttcaattgaatttgattcaatatgccattttaataatggagaaacaaaattctttgtttgaccacaaattaaatgacaaatgaaatcttcatactctgcatcagggttgaaccttcatgtaaataatagtcatcagaaaataaaaattcagacgttttaaattgattaagtggttcaaagtgcttcttcataaagttagtaattaaagtaatatcaaaatcatatgccttcttcattgcagtgacttttttggaagtaaatgttttcttgaatttatccttcatgtaatttttaattggcttaatatagtcaagcaaaggactatcgtcaatatcagcagtatcaaatctactgtaaaataattttgattttttgttagatttgaaaaaaagtaagaaaaaattcataatttctaacagagaatctccacataaattttggattttctaaatatttatcaatttcagcatcatcaatatcaaaattatctacggtaatttgaaaagcatcttttctaatttgtttaactcttaatggattttcaacacaatatcttgtaagagcccattgataaaacattaaaagttgaaatttaagaatatcagttgcatcttttcttaaatcacgtttcttaaaattagcataattggaatttctagcttctttcatttgggcagtaccacaaacagttaatgtagttggatgcaacatcaaccaaagtggtttggttaacaacccttaatttatcagatgataaacgcatttcaaagatttcagtaaactaaaataataaagtactttaaaggttaataacaaattggtttaataaacttaatgaataactttcttataattaaattataggcttaaatcgaattgggttcagaaactttttaattcaaaaataagagatccagtaaacaataaaccggggtatatgcgacagtacttagtggcagtaaatgaaataaatcaaatgaagttaaataaaataaaaataaatgaaataggaccaaaaacggtaaagaaatgaaagaaaggggatggaataagtgaaagtaaaacaatcagaaaaggggaatcttctaaatactaacaaaaaataccaagataaggtaaaagatcaataaaaagactgattcctctcttccccattctactaaatgggcaacttccatggtccaatattcattctatatagatgatgatgccttatttaattatctttcctaattaaggtaatttttagtttcccactgaactgattttatattacgtaatatattgtgaaagtttaattttcatgtagtgaatcgattttgccactaatttgacaatgttgttgtatgggtagctcagtgaataaatcttaactaatggctacaaaattgaaatcactgtatgtaaatatgttagtagttagtagtaaaaatctagagcaaaaataaaaacaattgaatattaaaaccaaggcacattcattttacccctgagtggcggttacagatcgaaaagttgttctaaaaaagatgatacaatcataaaagtcataatattaaaatattcagtatctgcttatcatactactgtattttatatgttgtaactttggtatcaattgatataaaactaatacaataaagaagatagaagaacagttaaaatggaaaaagcagattttctgagcagccatctccaatatcaaagaaagcgaaattgaaatatatccaaatttcttacgtaatttaatttttcgattgacgataatacacacatggttttaagaataataatttaagttataaatgatataaacaaacagaaatacaaaatgtaaatgaataataataattttaatatatgaataataaaaaatagtgaatacaaactagcgtcctattaacttaaactttagctgcaagttcctctaagagacgataatctctcttttcaattgaaccattacctggtaatctggtttcattcattaaataaacatcaacttcacgtgcacattgtctaccttcttgaataccccaaacaactaatgattgacctcttctacaatcacctgcagtgaaaacattagatgattcttcaatttgatatgatgtagattcatgagttgcaattgtacctctctttgttctttcaacattcaaattatctgattctggaccaatgaaacccatagataataaaacaatatcagctgggaaaaattcttcagaacctggaatttcttgcatttgccatgcaccagaatctgatctcttccattcaacacgaacagtcttaatacctttaacattaccttcaccgtcatcaacgaattccttagataaaatacaatattctctaggatctttaccataatgttccttaacttcagtatgaccataatcaactctgaaaattcttggccattgtggccatggattatccttagctctttctgctggtggatgtggtaataattcaaaattaacaattgatttagcaccatgtctagttgctgtacctaaacaatcattaccagtatcaccaccaccaatgacaataacatttttaccttcaatggttgctctaatagtttcaagatcattttctaataatgctttggtatttgcagttaataaagtcattgcaaaatcaatgttctttaattctctacctggaatctttaaatctcttggaatggttgaaccaatggctaaaataacagcatcattttgtttctttaattcatctaatgtaatatcttcaccaatagtagtactagtaatgaatgaaataccttcagcttccattaaatcaactcttctttgaataacacccttatctaatttcatgtttggaataccatacattaataaaccacccaatctatctgatctttcataaactgtaacagtatgacctgccttatttaattgatcagcagctgctaaacctgaaggacctgaaccaatgactgcaacttttttaccggttctaatctttggtggagttggaacaatccaaccttccttgaatgcatgatcaataataccagcttcaatagatttaataccaacaggtgcattacctgaaacattaacaacacaggcaccttcacatggagcaggacaaattctaccagtaaattcagggaaattattagtcatcagtaatctttgtaatgcatcataccatctatctctgaaaactaattcgttccattttggaataatattagaaattggacaaccagtatcagattgacagaatggaataccacaatcaatacatctagcagtttgaaattttaattcatcctttgttaatcttgaagataattctttccaatcttgaagtcttgatttaactggtctgtatttttcatgtcttctagagtatttaatgaaaccaccaactttatctaatttaacagctttggattcctctgcttcaatatcaatcattgtatcttctaaatctaaaactttaggttcatgtttcttagttggttttggcttagagaattcaccaccagtaatatcagcttcaggatcttccttaatagttgagaaataacttgaagcttctttcttctttgattcttcaagtttcttggctttttccttctaaaactttcttatattcaaatggtaaaactttaacgaattttttcaggaatctattaaaatcattcaaaattcttaatgcaatttcagaattggtataatgtctatgatcttctaataaacctcttaagaaggcaatttctgatggatcagttaaagtagataattcaactaattctttattaactttttgatcgaaatcttgagccatatccaaaacatatgcaataccaccggacataccagcagcaaaattacgaccaactttacctaaaacaacaactctaccaccagtcatatattcacaaccgtgatcaccagtaccttcaacaactgcataagcaccagaatttctaactgcaaatctttcagctgcaatacctctaaagaaggcagtaccagaagtagcaccatataaacatgtattaccaataataatgttttcttcagctttaaatgttgaatcttttggagggtaaacaattaatctaccaccagacaaacctttaccaacataatcattacaatcaccttctaattctaaagtaatacctgacgctaagaatgcaccaaatgattgacctgcagaacctttaatatttacatgaatggtatcatgaggtaaagaagttggaccaaatttcttagaacatctgtatgataatgtagtaccaatagctctatcagtgttaatagcttcagcttcgatagtaacaggtaaacctttatccagagtaacttcagcttcatcaattaatttattatctaatctgacatgtaatctatgatcttgtttcttttcacacttagttgcaacaccaggtctgattgtatgagcaggagttaaaattggtgataaatcaatattagcatttttagttgttcttaaatcttctctgacatataatttttcagctctaccaaccatttcatcgatagttctaaaacctaattttgccataatacctcttaattcattagcaacataatagaaaaaattaatgacatgttctggagtacccttgaattgttctcttaaaattggattttgagttgcaataccgactggacaagtatttgtatgacatttacggttataaacacaacccattgcaattaatggtgcagtagcaaacccccattcttcagcacctaataaacaagcaactgcaatatctctaccagttttcagttgaccatcagtttgaacaacaactctacctcttaaatcatttaaaactaaagtttgatgagtttcagctaaacctaattcccatggtaaacctgcatatttaatacctgtccatcttgcagcacctgtaccaccatcatgaccagaaactaaaatatgatcagccttagcctttgcaacacctgctgcaataataccaacaccaacttcggagactaatttaacagaaactctagctcttgggttagaacattttaaatcataaattaattgctttaaatcttcaatagaataaatatcatgatgaggaggtggagaaattaaaccaacaccaggagttgaatgtcttgttttagcaattgattcagaaactttataaccaggtaattcaccaccttcaccaggttttgcaccttgagccattttaatttgtaattcatcagcatcagataaataatatgatgtaacaccaaatctaccagatgcaatttgtttaattgaagatctcattgaatcaccattatctgaaggttttgatctttcaacatcttcaccaccttcaccagtatttgatttaccacctaatctattcattgcaactgctaaggttgaatgtgcttccattgaaattgaaccatatgacattgcaccagtacaaaatcttctaacaatttcagtccatggttcaacttgatcaattggaacagaattagaattttcaaaatcaaaatctagtaaacctcttaatgtacaatttttaattgaatcatattcctttttagagtaagcttcataagctttattatttttatttctaacagcatcttgaatattagcaactgctgctggttcattaatatgtgattcaccaccatctctccaatgatattcaccagattcaggtaatccctttggtttaatggtatctctatttggataacccatttcatgtaatgaaaatgcatcttgtgcaatatattcaaatgtaacacccttaattctagatgctgtacctgcaaaacatctatcaataacagaattatcaacacctaaagcttcaaaaatttgagcacctttatatgatgctaaagttgaaatacccattttagacataactttaagaataccatcatcaattgcatgtctataattttcaataatttctctattagtgaattctttggttaataatttttcattatttaatttaatgagtgaatccattgctaaataaggattaataccatcaacaccataaccaactaaacaacagaaatgatgaacttctcttgcttcagcagtttcaacaataattgcaactttagatctttgcttttgtctaactaaatgatgatgaactgcacctgatgcaattaatgcagaaactgcaattttagttgcacataagtttctatcagataaaataataatttgagaatcatcaacaattgccttagttgcttctgcacaaatcctatctaaagcttcagtataaccagttaacccttcagatttatcgaatgtaatatcaatattagtaacattccattttggtacaactttatttatttcctttaatgctaatagttcatcatttgataaaattggtgatgacatttttaatctattacattgtaaaggattcatttctaataaattaccttgaggaccaacataacattctaatgacataacaattttttctctaattggatcgattggagggttagtaacttgagcaaataattgtctaaaataatcataaattaatcttggttgttcagataaacaagctaaagctgaatcattacccatagatcctaaaggttctttaccaacatttaccattggaactaaaattgataaaacttgttctaaagtataaccatttgctaataatttaggatcatcctttaatttaacatctgaatcaactttagtttgtaaactaatacctcttgaatttaatttagtaattaattctggaattgtaatcatatttgataaaatccaagctttaaaatcaaatctatttgcaacttgtctctttaattctctatcatcaacaattctaccttccttagtatcaactaataacattctaccaggatgtaatctacccttggtgacaatttttttagattcaattggaataacaccaacttcagaggcacaaatcattatatcatcagttgtaacataatatctacaaggtcttaaaccatttctatctaaattagcaccacagaatctaccatctgcaaaagtgaataaagcaggaccatcccaaggttccattaaacaagctgcccattcatagaaagcttttttctttggatccatatgttcattattttgccaagcttcaggaactaataacataacagcttcaggtaatgataaaacaccatttataactaaaatttccaaaacattatccaaagcggcagaatctgaaccaccttcttcaataattggatataatttatccatatcatcaccgaaaagttttgaagacataacaccttctcttgctctcatccaatttttattacctctaagagtattaatttcaccattatgagctgcccatcttaaaggttgagctctatcccaagatgggaaagtatttgttgagaatcttgaatgaactaaagcaaaatgacattcataatcagcattaactaaatcatgatagtaagagtaaacttgaacaggaactaattgacctttataaacaatatttttatttgaaagtgaacaaatatagaaccaattatgtaaaccaattgtatgagttgcttgttttcttaagatatataattgtttttcaaataatttttgatatttagattcgaattcatcatttgatatttcaattggttttgaatctgtaccataagcatcctttaagacaactaaaggttgaataatttgaggttctcttgataaagcagcaggacctaaaattgatgaatcaacaggtacatttctccaacctaaaactcttaaacctaaagaattagcaatattttcaaaagttttctttgatttttcataaattgaatcatctttcttgaagaataaattaccaactgcatattgacctaattcaggtaattcaacatcacaatgatatttaaattctcttttcataaatttatgaggaattgaagtcataacacctgcaccatcaccatctcttgcatctgaaccaactgcacctctatgcgtcatattacaaagaaggtattttgcatcagagataattttatgggatgcatcacccttaatatgacaagcgaaacctatattatattaatattatcatatatgttagtataatgtattaaaagaagaaaagaaaaaaaagcaagttttgttttgttttgtaatacataccaacaccacaattatccttttcgtattcagggttatataaacctttttgagttggtaaagttgaagcccaagatttattttctggaacttcatcatatttatagattgaatattgttcaacatcatcaccagatgagattgatgaagcagatgatgatgaaattgaaatatcatttgaattattatcggagtactccgagtattcaaggagtggatctgatttaattatagccatttaatctatgcgataagatatattataaagaaaatgagattgatatatagtataacgatgattacttatcaatagatacaaagcgtgtacccaaaagaagagaagcaagagagtatatatcaaagaccaatttaaaagtcaattaaaagtcatttaatttgcaatgtccatccagttgtgggatgatgcttctctttatagcaaaaaaaaccattgttcaaattacgtaatgactttcccttattaaagactaaacacccccgcttttctctaatcgcaccaatgagagggctggaattactaactgttattcgttatcgtattatgttgattattttatatgatatttatatgatattctatctatctaggactatatataaactacatgtctattcctcatcttcctctgcttcctctgatgcctctaatccacccgcttcaggttcaacaacactttcaccatatccacgtttatattttctagcaatacgactcacacgtccatatttatttgcttcttcaactgctctattttgtaaatcatgaatttcttctttaaatgatttttgtactgtagcattactaaatacatcccacatctttaatcctccattattactacctccaataattaaattacctgaaacttcaatttcatctgcaaatgaactattcaatatattaccacatccaaaatctttacttaatatcatacgtggtttattatctttaacattccaaactttaacaactttttcacccattgcacctgttgcaattaatcctggaatttccttattactacttaatgtactaataccggaatcatgtgcatgtaatgtccataatggtttttcatcatctttacgaatatcataacaataaatattacctgaatcacatccacccattacataatattcacccatcttagaaatactttcaacttcttcaccatattcactaccacatgaaaatttcttattattacttgaaacatcatctaatctaacatcacttaatctcatataaccatcataaccacctgtaagtaataatgatccaccttcaacatcattaccattattattgaaccataaactacttgaaactgtcttaccattatgtaatccttcaatacttttattaactttacaattactcaaatcccataatttaactgtactatctgctgaagtggaacataaaacatttctaaaaatatgattatgagataatgaaacaactgcatcggtatgacatgttgaactaatcttattagttttcttcttcttattaccctttttacccttaccaccaacatttttggcactccattctgcatattcattttcacctaatataacatcagggaatgctttatcaatacaatctaaattccaaatttcaatagttggttcaaatgtaccaatagctgcaaaattaccaatattactaacatcattttcaccatttggtttaaaactcatccattcaacacataatgggaatgatggtaagcattaaatcatgatgaatatataaattaccttcacgaaccataccacgtttaacatcttcatcaatttttttctcttcttcagctgcttcttcatcttcaggtcctaaggcacctgcaccatcatcataaacataaacatctaaatatgaaacatcatcctcagttctagttgcaagaattaaattatcagttggataaatttgtaattctgccttaacttcattttcttcctcttcagttggtaattgtaaataatgatcttcttcaccttcaacaaattcaacatcttcatcatcatctttcaccatcaccattactaccttctttctttgcaactttaatatattttgctgcactattacttaatcctgggaacataacaattttttcaccatcttcattatcttcatcatcataatgttcaaaatcatattcctttaaatcatcatcaatatcaatttgatcctttaatttattagaattaataggtttcttctagtttcttcctcaatctcaatttcaatatcttcatcaccttcaacttgttcagcattttcaagatctgccttagcgtcttgtaaatttaaacttgacatagcttcaattctagccatttcttcatcatttaattcataagtttctggaaattcactggcaataccccttggaacccatgctgttgcagaaatcatccttgatattcaaacaatttattaaactaacgatttaaagtaaattttaaaaaaaaattattttaaaaacaaaattattcatgaaaaatttcttagggaaaaaaaatattttttttcattcgaattttttttctgaggggcagttaaaaaggaaacatgattttcttttgcattagctacttccatttatggtaattcattatttctacgtttagcaattataaagtatttactataaaattttgttctatttttattctatttagcaaagtttcttatacatttgattaccttcttatagcacggacaattggatcattccagatagatggaccatagataggatggttctgtatgcataaattagcaggggggatagtcattgctctaggaccgaagtggaataccacctgggatcatatgatttggtctagcatacacaccaatattcatatcattgttagtatttcttattttgtatggcgcagttgggatttttccatttatttttttgttgttgtcgttatttgtattatttgtattattccaatttgaagttagtgatggggcgggatatgtcatataaaattgaacagtttctttattaacattcaaactgttactattacctgtattggtagtattggtagcatttgttttcattgaagatgtagatgatttttctgatgtacttatagtattattgtgactttcactttctgtgattgttgaaccaaatctctctgatgaacttactctattctcttcttcatctttcttattgagtttattttgaataggctaatttgaaagttgtttgaatatcttcgtttggtttcctttttgttaggaactaatatttttcttattttctgttacttctaaacttatctcactgagacctgctaaaacattctttgtatcaacttttgaagctttcttggtattatcatgaataattttaacaactttattttgacttgctttttcctttgtaggttttggtgtgttcataagaaaagatggtattaaaggtattgattgtgtatcatttatcttagttggttccatttttggagttgaagtcagtggtgcttcatttttagctgttgattggaatacatctttgaaaaataattgttgatcaaaaatattattattattattattaaatcctcttttattattctgagacttagatagtggtgaatttgaacaataactgtttgtttctggaaaaaaattacttcttggtttaggtttgatagttcaagttgccattggaatctctttttaaatttgatcttacctttgatatcatttctccttctataatggtcttcctcatgatttttgtgtatttatgaaaaacaaatgaagcaataatgaaaatacagaaatataagtatctttgtgtttgctttttaatttgaataatttctgaaattgactcatctaaaccatttgagtttacaatacattctttaactgcaataagtatattttgatccttagttattaatggaatcatatcaagacatctataatttaaaaattgttagtattcagttaataataatagaaaatataatttttatacttactttccaaaactttcccttgctaatgaactgaaatttgctttggaaactgataacaatctttccttatgtgatgttaagcatcctaaacttgtaccatcttgattaactgaaacggggacaaattcatttgaatatttatcccatccggaacatttacaaatattaccataagaaagcttggaaaatagctggaattgtgtattcaccatttaatgagaattgaaagaattgtaaatagacaatcaataagaagattgctattatggggacaaaacaagtaaaaaaagttgaagtattcggcagcatgtgtttattatattgctacaatctacaatataaggtagttctactcaatgtatactgcttaatcaacaaataccagtaaacaatacaacaatagtcaacataaaaggaaatgaaaatagaagtcgtaaataaaaagtaagggaaaaaaggagtaaatttatagataacaaaaaaatattccactttcccttatctctactatgagttttttttacaccttttattataataatttctaaaacgtaaagttctttttaaacaaacaggaaatacaaaaatacagttatatataaatataaataaaaatggggtgtaacagaatgtataatattaacagagattattggtacttttattttgaaagcttttgtgcatattcagctgccttagccttaacgtaatcttgagatttttcatcaccttgagtttcttcaaaacttaaccatttagcaaagaagaatttagcttgctttctagttaatttcttttcaataactctttcaaataattcatcgaactttactcttttcattagctttaatttcttgatcaatataaacattccataaatcaattctctttggaacatctgataataaaccttcaaataatgaacgaccttgttctggatctcccttttggaattctaattgtgcaaattttctaacaacatcgacatgatctctctttggtaaaacttgtaatgcctttgcaagtattttatgtgcttcttcattctttttaccatcaattaaaaagttaccatatgaaacccaagctgatggattctttgaaccaaatttcttacataaaacattgaataatgaattagcttcactgaatttttcggatgcaatataaattgcaacaagtttttgatgcattgtatatgcatccatatattgacaagatctcttgaaaactgcatctaatgtttcatcatcaccaaatgaattctccaaatttaataatgcaatccaaatattcatcttttgttgttcttctctaaaattaatagtctttaatgctctttcagcaatttctctagctttttcaatttcacttaattgaagttggaatgacatatattgaatccatagaattgaagaatttggattaccaactaataatctctcaaaatcagaaatggattgtggtgatctagtatttaattcatcagttttatcttcaacttcagcagctttagccttagatttcttagatttcttattaacttcgttattgaattcttcctcttcatcagatgattcatcttccttagcttgtgctaaaatagatgcagtccaatcaaaacctgtaggataaaccattagttgaaagaccttcgcttgattcattattattagtttcttcttcttcatcactttcttctgcttcttcgtcttcactgtcattttctggtaccatcttccattttttcatcatcagaatcttcattcatttcaacatcattattttcaccatcttccataacgatatcttcgtcttcttcttcatcttcaccatctttgaaatatgatgctttcatacctaatgataattgcttttttatcagcattgatttctaaaatcttaaccttaactctttcaccttcactgaaaatatcttcagcatttttaattggtgaatcagtaatttcagaacgatggcataaacctgaaacattatcagtaccatctaatctaacaaaggcaccatattcttcaactttcttaattgtaccttcataaatttcaccaactttcaaatcagcaaatgattttaagttctttaaatcaccactaacaacagactcctttaatgacattaaaactctaccttcagattgtgattcaagtatacgacctttaactgattgattgacattaaataattttttccaatccttaatgaaactatcagataaatcagagacacgaactaatgcatagacagatctacctaaatcaacaaataaaccagaattggtaattttattaatgtaacctctaacaatatcaccacgtttaacatcttcaacagaattaattaatctatcctttggatttggaccacgtaatgaaacgtacagttttctatcagttgaaacaacagttgcagtatggaattcaccaacatggaaaacatcacttaattttaaagtataatcatctaaagcatcggtaaccattgaaacagcagtaatattttcacctaatgaaactaaaacagaattatctctaacattcaaaactaatgatggtaaaatatcaccaactttaatatcatctgaagatttaatcatctttgaacgaccagaaacattgattgcgtaatgatcaatatcaacatttataaccttagcaggaacaatagtaccaactttaaattcattttcaaaattagataatttagaaatatcatcagtaacatcaacaaatgacattttagccttttgagctgcagatatattataccagaaataaccagaatttatacttgaaatgtaacctaaaacttcttgaccttccttaatatcattaaatgataatggatatgctgaatcagtggatttcaaactagatggtttaattgataattcaactaaattaagttgaggattttttagaatgaataaatttttgcttttcaacatcgaaataaccaattactttaacttgatcaagttttttaccaagattaaacttagaaagaggatgtttcaaatctttgatatctttaatatcatcataaatttcagttatatcaatacgaccttcttgattatcagataatttaactaataaatgggtatcttcaattgatttaatagtacctttagtaattttaccaacagaataatcacctaaagttttaattgatttatcaactggattaactgcagcttcctttgaattagcagtttcgactaataatgaaagtaagaatcttttattattttcatcagcattaacaactgaacaactaactgattgatctggggtgaaaacggtagttaaatcggtaattttcttttgagaagcaaatcttggaatgactaaaccagttaaattattactgaatgaaacaaaaacacctgatggaatgacagttttaacataaccatgtaagattttatcagagattgaaatatcttcatatgaagttggtaagagaccattctttgcatctttaattaatgaaggtttagcagttaaaacaacacctcttttacgattatcaatttgtaaaataagtgcttcaattttttcaccaacttttaatttttttaattgatttctaccaagatcagcaggaccatcagctaaatgaccaactttaataacaccattaatattttgaccaccaattttaacaagaacttcttctctttgcttttcaaggatttctgcttcaacaatagatttacctggaattaaatcttttaaactattcaattgatcttctgacatatcacctgaaattcttaaactgactaaacatttagattgttcagcatcaaatgaaacaattctaactttaactgtttgacctaattttaaataatcacctgcatttttaacaaaagtttcacttatttctgcatttggtaagaaagcagatacattaccaaaaaatgaaacaacacaaccggatggtaagattttttgaacagttgcaagagcacgtttattttcagataaatcactataagttttaacaatttcatcatcttctgcactaactaatgatcttttcaaagttgcagtgattgttgattttgaaccataatttgaaacatttaaaattctagctttaactttagaaccgattttgaattttctttcaggataaactaatttaatatcactaatttggaattctggtacagttgcatggaaattattttcaagttgaagaacgataccttcagaactaactttttcaacaacacaggtaactttctgtccaactggaatatcatttgctcttataaaattaacatcaatttgttctttatctaatgttaagatataggtgttatcaaacattgaataatctaatattcttgatttatgagtggaaccaattttaaaatctaagtctaaatctgcacctttagtaactcttgttctatgaacttgacctggaatttcacctgacattaaatcaacaaagaagaaattatttgatttacccttaactgtaacattatcgagtgtatgaccaattggaaaagcttctaatgcatctttacctgcgtaggttaaactttgatgagatggtaaaatggaaatagataatttatattcagcatttttattatatgaggcaataattctagcctttaagattgaaccaactgaataattatgttttatttcatcaggactttgtaaacaattcatatgttgtaaagttaaggaagcatcacacattgaaagaactttacataataaaccattttcagtaactttttcaataactgcgtcaacaaacataccaggtaataaagcagtaacagctgagactgatgcaaccattggttgttttttgatatttgcaattggaattttacaagtgacagttcttgaatttatctttgcaacagtgacaagaataactgaacctatttctattttggatgaaagggatgataattccttcttggatatgaaaccagtatgactgaattttttaccaaattttaagatagcaccatgatcttcaattgatgatacggatgcttgaataatggcattttcaataagatcttcactttcggtcatttcactgtttactaattcaggttcaatagataattcaattcttttctttaatttttcctttgaatttggaacaactttagctcttagatattgaccaataaaaaatctttcatttaaggatgggaaatcaatttgttgttttttatcagttaaagttttcttatcattatcttcatcatcgctatccatttcttcatcactgtcactgtctgattcttcttgatcatcatatttttctaatatatcaactaattcagatgaaatattagtaattgggatataaccaactaaattatctgcaagggagagaacaatttccattttattgatttgttgaaccatacctaaaacgtatgaaccggggtttaagatattatatgataatgtatcaatagtaattttatcgatatttttcttttcatcatcctcttgttcatccttagataaaagattcaattttttggatttcttattattagttttagatttcttcttagaaggttcgtcagatttagcagcttgttcgaaaagaacatccctcttagcttcatttgcaacttccttcatttccattggagttaaaatagatccaccacctcttgggaaggcgatttcagcagcggatgaaagcaaggatttttgttccttgttatcagggtcttctcttgttctctttggtgccattgtcgtagataaagaggaagcctgtgctatgataaataataaatctaacaaatgaaaagtctaactataagtaaaatagaaaaaataaaaattttttttcatgtagtaaaagtgaaattaaaatttcatcactgaaaaaaaaaatttcagaaaatgaaaaaagcggcgattttctttgacatgaaatttatcactttagagaatttcatgtagtgaatggttcattctggtcctttatgttgctttatttgcacttatatactgatattgcacatagtaagatactagaactagtagagataataccctttctcatcttttgattttaaaacctttgaaaaatcttctcatttcgttttgtttccgtctcatttatctagatatagtatcaggggtatcatctccaatactgacaaaagttatacattaaaaacagtttatcatatccatccacagcgtcaattttccatttctaattcaatcaaggcaaaacatatagccatgtcattttccctatcagtaatctcacatccaacttcagatatttctaaaccagctctctttctcgaagataaaagtacaggtgatagaacaattattggtaatgtcccagcaggtttacagagacaatgtaatgagaaaaaatataggataagtcgattgaaaaatatctttcttacaggtgtgctttcttggaaggctatatctggattacctgggttcattttaactgttagtgatcaaggtgttaaaaaattaggtatttatcatagtggtaataagcttattcaatatatggtttcatgttggagatattttgttttcagatttggaatgaacttaaatatagaatgatgtaagtcaatctcttgaaagagatagtgttaaatatatcccaatcaatatacattcaaatataaattatggatctaatgaaaatgatcataatctagttgaccatgcaaaattaaatcaaatggtttcaaatatattccctatacaggcaaatccttcaaatcctacaaattccaagaaaattactaatgttacattacctaaatcaattataaatccaaaagtttccactaattggataatatatccaaaaccaacaagaggtaaatttcttgttaataatgctaaaagtttaggttgtgatttcactcatttcaagaaattatgtaataatgaagaagtcgtcttggagaatggtacaattgttaaacctgaacaagttctagaaccaacaagatattttgcacctatattagtattggatatcccatctgaggaatacatggaaaatttcattaatcacgattggaaaaaggattgtccggacaatttatcttatggtatggtattccatttctttggtgaatcaattcaagatccattatcaaatgaaagatatattcaatttattaaatcttttggtccttctacaatgcatttgaataagtcataaatcctattgtcctaacagtttaaatttccataaaacatttagagtatcattaaaatggaaatcattaataccgaatttcttccattacctaaatggacaaatgaatcaactctaaaaataaataatgaagatttaactaatgttattccattgatatctggacaacaattcttattaactccttcaaatcttactcaaaataataatatagcaagtggtgaaaacatcccattactttgagaagaaagattgtaatgatatatatgatatggaaatcaaacctctagaacttaaagatgttgctagtagagaacaatttaatacaatgattgatgaaagtaataataataatgtacaagttttaaaaacttcagtcgatttaaataaatcattaaaggatcaagtcgatactttagtattgggtacaggttctgcattaccatccactgttagaaacgttctttcaaatattgttagaataccatatgttaaagatgatggcactagtggttacagatcaattcttttagatggtggagaaaattcatttggtacattacgtagaatatataaacaagaagaagttgaaatgttattggatgaattgaaaatggtttatttatcacatttacatgcagatcatcatttaggtattgttgattttataagagaatggaattcaagacaagattttaaatttggtagtagtgaaagatttgagaaattgattgttattgcaccatggcaatatgaatatttccttcaagaattaaatagagttgatccatttattaatactgattttattgtttatatctcatgtgaggaatttatgcttggtaaaactttcccaacatcaaaacaatttgaaattgaagaaattgataatttggattcaatcccatctgaagaggtggaatttgttaaagatattaataaatctgaatttgtttattcaactttaggtatggatgaaattaaaacatgtgctgcacaacattgtgatttctcatactctgttagtatgtcattcaaattaaacattgattcaaatgataattcatctgataatattttcaaaatttcatattcgggtgatacaagaccaaagtttgtatttacacatattggtgaaaattcagatttactcattcatgaatccacacttgaagatgaaaaattcaaagatgcatttgacaaaaggcattcaactacatctgaagctgttcatgttggtatcttaatgaaggctaagaaaattttattgacacatttctcacaaagatataaatcatttacatgttctgatgttgtttataagagacttgagaatccaataaccaaggatgatctcattgatggtgatgacaattctgatattccactactttctacaacaactttcaaggagtattatgcagaaattactaataatcctgaacttgcaattgagattaaatcacctatattttccaaagaattagatattgaaactagagctgccgctggatctaattgaaatactttttgcatttgataatatgaagatccaatatgatgaattccatattcaaagaaaagttttcgaatctcaaggagctaatttggaaaaactctttggtactgaagaagaggaggaagagataaaggaagatgtagaggataaatcttcaaagaaagaaaccaaatctaagaaaaagaaaaataattctggtaacggaaataaaaagcaaaaagtttgattattaagaacatgaaatattgtttcacattgtatatagaaaattataataattgtataatatgttaagtaaatttaacttaaatcaatccattgatggtgttaatcccataagtgcaaatttcaaggcattatcatcatcaacgagagatatgtattgtttaactcttttgctaatagtattatcggctaataaatcactattgacatcacagttttcgtttaacttcactggaccatttcttctaccatctaattcgtatatagtatcacccttcttaacgaagcaaacaaaatgtaaatctatattatcttcagcagctggagcttcagtctgaccctgttccccaaaagaagtgtacatatctttagcaatattttgaactaattttacaggatctgaattattctgtaaaatttcactacgaaatttatcaactggtgaactttgaactattaaacctctaggtatattcaatagtgaatgtaataaagcatataaaccacaagcatttttaacaacttgtttcaaccaaacaatttgtgaattatctatattttcaacagtttcagagtctttgaattgttcatatttctcagttattgggaaaagtaatataattgccgtgtattggccttggtataaatgagataagatcaggatcatctaatgagtaaatatcagtgaagtttaataatggagataatcctaatttacttgcaaattcagtaaatatttcaggatttgattctaatggtataacagcgtcaattgatggttgttcactcataattggtgtaatttattgtcaagtgtagaagatactgatgcctattaacctaatcagtggggattgtcccccgggtgaaataattttgatggcagcgctgggatgaaatttcaattttttttaacttggtgctgttcttctgagtggacttttcttctttctttactctctgggtggcttctaatgttaattcgtttgtattacgtgcaatcttaatggcattgtaatatggacaacgtttagagaatatttgaaagcttgaatatattttacttctttcattcaaatgagtcatacctttaatcatagaataataattcaattttgccattcagggggttgaaatgattattcttcttttacaatcaattgtttgtatttttttcccaggatttcttctactaactactgccaaactcaaaaacagcatagcaactttatatcctatccgaatacaagtatccaaactagttaacaactgataaattacataaaattttgtggcaaaatcacttgattaattaacatgaaaaattagaaaagatttgttacgtaatcaaataaatgagggaaacttaaggattaccttaattaggaaaaataattaaataaggcatcatcaactatatagaatgaataataggaccatggaattgcccatttagtagaatggggaagagaggaatcatctttttattgatcttttacctttatcttggtattttttgttagtatttagaagattccccttttctgattgttttactttcacttattccatcccctttctttcatttctttaccgtttttggtcctatttcatttattttcatttcatttaacttcatttgatttatttcatttactgccactaagtactgtcgcatataccccggtttattgtttactggatctcttatttttgaattaaaaagtttccgaacccaatttaatttgaatcatataatttaaatataagaaagttattcactaagtttaataagccaattcattaaagcatttattactgattaatacatttattattttagtttactattttaataatgcatttctcatcagagtgttttaaagttcaaaatgccatattggttcatgtagctacaactgcattaactctttatggtactagtcaatttattgaagctagaaaatctaattatgctaactttcaaaaagcgtgatgtttatcttcgtgctaaaactattttaagaagacaattgatgatgatatatcactggtccttaactagatactgtattgaaaacccattaagaattaaacaaattagaaaagatgcttttaaaatttctatggataattttgatgttacaattgaagaaattaataaatatattgataatcctaaatttttatggagattctctgctagaaattatgactttctttgttacattctttaaatctcatagaaagtctaaattgttctatagtagatttgaaactgctgatattgatgatagtcctttggtagattatgttaaaccattaaataattatcttaaggataaattaaagaaaacttttaattatgatattacttcaatgaaaagatattataattatgatactgattatattcttaactttatgaaaacacatttgcaatcaataaatgaatatgaatctgcagaattcttatattctgatgactattatttacatgaagttcaaccctgatgctaaatatgaatgattttgtttgtcatcttttatgtggtctgtcaagtaagaaaaattattcaccacttcttaattggcatatcgaaaatagattatttcaaaaggctaaaaagatttcagataatccaaatatcaatactattctgaaattcaaacttgcaaatttagcaaaattaaaaacttcaaaaattccaagtgatgaattcaaattatatagtgatttatcacttaaaactttaaagtttgaccaaggtcatcttgttgaaaaggttcaacctgttcaatctactgttgatgaaaattcaactactgtcaatcctgtcaatcctgttaaccctgtcaaaacaatcaatcaattaaatcctgtcaactcaccaaataaaccaaaccttaaaaaaattaaaaatatcaattttgatgtttcacctaaatcattaaataaggtacctgatgatcttatgcatgcttatgattttatgtttccagaaaaaaatcaaaatcctgcattaagacttgaatgtattaaagaaattgttgcatttagaagaaaatcatttcaaacaactcatagattttttcatactgattggcttcatgaatatagaattaaagttaacaatattgaaaattcattttataaaattgcacttaagacatttggcttctaaatgtaatatgcaattctttagatttgatgataaacatggtgtttctgttagaactggttgggcagttccttgccctgtggaattaagaaataaaatttcaaaaatatttcttgaaagtgctttcagtgatgaagaagattatgaaacagaaatgttaaaattatatgaagaatgtaaagatgattttaaatatcgtttcaatccaactattttaattgaagaacctgatgatgatcaaacttataattttagatatgattgttcatttggtgctaaggttaatgattatggctttaatttttctgccatgtttgatcctgaattattagattatgattttacttcaactgagaatactattgtggctgatgatttccctccatttactcaatttcatctcagaaaatttgaagtttttcaaaatcaatgtattgatggacttggttatactggtgttaatgatactattaattcacttttacatggtaatttaagtattgttgatgatacaattagttataaaagtgtaaccaataatccttatcaagaaatcattgatgatgatagattaacacaattttcactcaaaacaaaatttaaattgaaatttgatgataaagattatgatgaagatgaaggtggtaatggtggtggtaaagatgctaatggtgttactggtgctgatggtgctaatgatgctaaaggtgttgatgattctattggtgctgagtgtgttagtgatgttgatgatagtaatggagctggaggtgttaaggatattggtgatagtggtggttctggaggtgctaaagatgctaaaggtgtcaaagatgttaaaggtattaaaggtgttaaaggtgctaaaggtgctaaaggtgctaaaggtgctgatgttgttgatgaaaaaatggtaaaccaaattaaatctgatgataaccctgctgtttcaaatgataaaattactaaactgccaataaactcattaattactcgttccactagttccaattctcctccaaatatttttaaccaaaaagacattaataaatcaacttctaagaatgttaaaatagaatcaagtgataaaacttcattaatcaaatctgctgatgctattattgatgaaaaggcttcacctaatgaacattttaatacctcaaaagaagtcgatccaaattccaatttagctgtaaaagataagattaatgaagttgaaccaaataaatcattatcatctgcaactgatgatattttacttttcattccacctatggttaaaaaaaagttaaatgagggaattgatgagagatacaaatttgaatttgttgactttttagggatttttattcgtggtagtaagaattacattaaaagtagaaaggtaattgtcaaagatttgaaaattgcatttaatgctctgtttgaggtactctacaaggatgttaaacgtgttgaaaaaaaatggaaactttttgactcttatttaacaattgatgatgctgcaaacagatctgataaaatcattccagtttcaagctgggaactactatcctggaagtcgtgcaactcaatgtgctgttggatggtatttatgtgcatattatgcaagatttcataaatttggtgtttctaatagagatgcttttttcttgaaggttatggaaattcaaaaaaagtcaaaacatgctgcatatgttctttatttatttgcaagagatagatatgtttcccaattattttatgaatatgaaaaacacttaaaatctactggaagatttaaaggtactccttaccgttttacatatgatctgtattatcataaaattgttgagaaacatggtcttaaaatgcttccttcaatcaaaataattaatttgacttatttgaattttggtgttgatttaagttggtaatggtatttatggtggtgatagttggttatatcgatgatgttatatcgatgttaatctattcaaaaatttcataataataaaaacttcaaattcaattcaattgaatgataataataataataataataataatagaaaaaatattcaaagtatattttttaaattcaaggtttgttttaaatggtgatttggttggtattattgattgttttacaggtgttatttctttgatttactgaatattgaacttttgacagggggtgatattcaatatgtatttcaaaaatcctttgatgagagtgcttagacccagtatttgacaggtactgggagctacatcaaagttatttgcttttctcgttgtttgttctttgttctttgttcttttaaaaaaataaaaattggtgtgttgaaatattaaatgtatgattttatccattattgttagtttcctttttattcctcttatatgttggtggaaaaatcattgtgtcgattaaaataattttaaattattttgatcaataaatattataaaattttatatagtttatgaccgtttatatttctttcttctctgtttaattaatacacacaaaaaaaaatctaacgctatataattaatcgatgtaattatctttccaagtctacaacacatactttattggttttatggccaccactgacaataacccatctaacaccctcttgatgcttctttaggttaaaagcattataaatgttagaaacataacttcttggtgcatctctagcaacacctccaactcttcttttccattcatcagcttgtttaactgatgtaattgcaatcatatctaaaacttcatccttggcttcaacaacaataactggagcatttgacatttgattcattaataatgatgcagctttttgtgaactctcttcaacaattagattgatctcttttattattctttttatttgcattagttgcaaaatttggtactgtgataattttatgattttcatcaaatgcattaatatgtgatggttcaaaactatttgatgtatttgaagtagttgccagactctctgcagaattatcatcaccatttgttttatgaagatttctttcgtaatttatagttgaaaccaattcaaacatatccaattcaaattcagtttttgtttccagatttttaagtctcaatggtttatatctactaggtttatccctactcaatgaagagatgtcagtatgagctttaataaaaagaatcaaattcacattgttttcccttgcttcataaagaatatcatccatagtaagtttgtttttaataacatcagcacttattccatttttccatagctcattcaaaacaaatggagcagtatcttgcagtaaacttgtagtgaaaatactaatcaaaacatcacacttaggagttctccaatcaatttcaatttgtttgttcttttgaaagcttttagcaagctttaaacctctttcaccttgtttaaacatttcttgatattttttcattgaattgaaaaggaaatcccatgctattctcaaaccaactgcattcggtaaactcttcgaatttttatttctagccaaatcttgaataagtccaccatatctaccacctgcgccaatgacagatttggatttttcttcgtgtcttagaacaaacataattccacctttatagaaaggtgcattataacctgtgaatggactaatagaaatggttgatttgactccaaatcctttaagataatcaataaccttttgtaaataattcaaagcagtttcaactctaactaataatggactatctaacatcaatttacgtaattttgatgcacaattttcaatactcattgcaaaatcaaattgaaccaattcattcaaaactgtacttgaaatattaagttcttgtttcaaaatagttttagcttctttcatggtcttagtatatccaacctcagataatattctagcaaccatcattgtttgagcggattcaataccacaatattccaaaatagtttccagtaaaccacaatgattcagataaattgtaacactagttgctttcaaaaatggaaaaacattaacaatttcagatccaactttaatacattcagcatcatagaatggtaaataatcaaccggatcatttgcatttataataatatcaaaatcaatttccttaaattttagtggaccagcactttcatcattggcatttgatctataaacacaatctattctatagactttatgagtttttaattttgtctttcctaaaaatcttgcaaatggaagagttaaatcatatggtaaatgtaaaactgatcctgaacgatctaaaacttgataaagtgaataatttgagtcatataatggatttttaggaaatattttacaactattatcatcaaaatgaatagcaccatgtgttttaaatattttttcaagttgtttgacaatttcatcatataataaagcatctcttgtatctggtatttttgaagtatctctgaataataaatccttggcaaaactgtatggttgagaaaacaaaatatttctggcttgatgattccaagcagaggaaggatcaaccaaagcatttaatgcttctttcatcaaatcatcctgttgctgtaccctaattcaaaccactaccaagtaattctcttgcaggatggtcgctttatctggatcatgatctaaaagtattttaataatttttcttctcagtaaacaatcttttggtatcaaaatcatgagggaatacaattgatggtgatcttaaatttctaattgcggtatacctttccattgatgtaccaagaggataaatcatttcaaaaaaaatgataccaactgaatataaatcgactttttcattataattacctttaccattcaaaacctcatcagcaacatataatgtagtaccaatttcagaagtcaattcatcaacagatttatttaaatcaagcttacttggtgatgtactcattgaacttaaattatgaacatttttagctaatccaaaatcaccaattttgacattttgattttcatcaatgaaaatattaacaggttttaaatctctatgaataataccttgagcatgaatatgagctaaagcttctagaatttgacgaatagttctccaataattatctgaatccttaggaagaccttgtctaatcaaatcatgataatgttctattttcacaatattccatttgaatgaacaaaactgaacgttttttactcttaggtttgattttctttttttcttcttgaactttcactgttacttcaggagtaccaaattcaaacggatcatcatcgagatcacttttcgcatcggcatcatcgtcggcaaaactgtgggaatcttcatcaaaattatcatcttcaagttcatcgtctgaaaatgaaaaatcaatagattggttatgagagccagatataaaatcggtaaaactttgactatttgttctggtatcactatatgtacggccgctttggtttttattttgcccacaatcatcgtcttcttcttcatcctcatcctcttcatcttcttctccatcacttgaatcaattgccgaggaatcaaagtccatatcatcctctaaccaagcagcaaaatatctaacaacatattgatgatttaatcttgccaacaacataacttcatttaaaattttagataatttatcctcagtatgtctaatctttttaattgcatataatctaccatctaagtctatttcttgccttgaacgacttcaccaaaaccacctctacctaaaacaccaacttcttcaaaatcttgtgcatatctagagtaaaatttaggagcaaatgttgataatccaaatgattctcttttcagtctcctacttgggtttaaagttaattgttgattaccattagcttttgtgttatcattggaattattcaaagttgttgttgataattctaatctgttagagccactagagtaagcatcatttgtagcttgagaattttcagatttatccaataaattttcaagtggagatacatttaaggataatcttaaaaatttggaagttaataattctaatggatcgggtcttttcttagttttaaattcaaaaatgtttcgtagaaattcataaatagaaccatctaaattaggacaactcaaaaggaaatcatttggatcttggaattcataaacaatatcagttcctaaaatcatttgtaacaatatcacaccaatatcccaaacatcagttttacgttgaggtttcatatataatcgactatttttggaatctatacgttcaggtgcaatccacccactaacggagaatggtaggaaatcggaatctgattgttgatttaaatttggataattgtataacatattaattaatgtatacccatatgtaatattagtcaattccaatctagcagattcagttgattccatttgcttaatagatatagaatctaatgtgatacatctatgtatcaaaccatgtttatgtaatttttctaaattttctaataattggattgtccattctctagcaatattaacgttaacatataatatggattgaagtaagtctcccaaagtttccgagtatttagataagattcttactttccaaatgcataaagtttcagtctcatttctggatgatttctttgaagttttcttagcagaagaattatgtaaagattcttcaccatttgacaatatttcctttttctctatatggaaagctataacatcagtggtctttaacaatgagactgcctgtaattctttttctagtgtcaatatagattttttaccctgactagttttccaaaaaggattatttaattcaacttcagttaggagatattgtaaatctttttcaaaaccttttgtatttctaccatatttagttcctattttactttgattagtttcactcaacatttctttaatctgttgatacatgggtgttccttccttaacatatggtttaactaaatattgtttggaaatatcctttaagagaccatttggttgaatgggcacaaatcctgtaattgttctaaattggaaacttacccaacttaaatggatatctattggtctatcgaaaacaaaatagtttgatttagcagatttttcatcaggaatcatatcacttgtaattgatgctgatctagattcatcatgtattacagagtgtgtactatttgatcgcatattattatcatcattttccatatattcttggaatgaatcattggtctcactactacccttatatctcctcctcatttccatttcaaccatctcacctaacaattcttgttccttctctcgttcagcctctaatttctcttgttcttcctggtgttgttgctctagtttcaatttctcattcaagattcttttctttctctcttcctctaatgaatctgtcttcactccactcttgatttcattcaaataatcgaaaatctcagtataccaagtataaacaattggttggcctttatattcgtttaaagcagtaggcacatttctcatgaatagttctcaattgagaatccataacatttttcacatttgttattttataaattggagcagataaggggtaagttgcagtgaattcaatagttaaatccaatgaacaaaccttatcatctgatgtatcagttgaaatgtgtaaaataaatttatgaaaaggtttttgattccaagcactctcttttggagtcaaatcctctaatatatctggatatatagcattgataacatcccattcagactgttgttgttcctcaacagattccatgctgtctggtatgttcttcacgtaatttctacaatgaaaaacaatagtctcctatataaaaagcctgaaagcctgaattttagaagaccactgcaacttcgctgtcattttcaatttgagatgactacgatacacagcttggtgtctgatttcttttaggaacgattgttagttgtatcaattgattgatattctgctggatttagtagtttaaagataaaggaagtattacttattaccatgtcaagtttgaaagaaagaaagacggattttgtttcggaccttgttggaggtaccactgcagatatttacattgtgacatcaatttcagcattgtcttatttagtttggtgtattgtgaaaaagaagagtagtttgtttgataatggtaataataactcattgatttcaacagttattgactttttgctcaattggaataatttactgttttccacaacagtgtatgcaaataatattccattattgattgttcttaatttcattccactggttcctgtgatcttaatgtcatcaaaatcatcgtcatctaatgatcaaaagaagagtaataagacgaataaaaatgatagtaataaactagtgagaagagcagttattaatttgaatacattaacatctaaggtattcctaccatttaaaacatacatcacagtttatcgtgcacaaatgatggttattacatgtgtctgtatcatggcagttgatttcaatatttttccaagaagatttggtaaagttgaaacatggggcactagtttaatggatttaggtgttggttcatttgttttcagtatgggtttaatcagtgctagatcatacattcgtcaaatattcgattcaaaatttaattataccaggacaattattaaaagtttccaaaatagtttaccaattttcattttaggattaattcgttatatcagtgttaaatcggttgattatcatgaacatgttaccgaatatggtaaacattggaatttctttctttacattagcatgtttaccaatattaaatgcagtttttgcaccaataattttccaaatatcaccattaataacaggtattttaatttcagtattttatgaatattatttaattaataaaggtggtcttgaatttattattgttggtgaaagagatacattttttggtgcaaatagagaaggtatattatcattatgtggatatttcccaattttcttaaatggttttacattaggttcatgtattttaactataattccaattcctggatctattttcaaaatcggtataagtaaggaaaatttaattaaatcatataataagggtaaacgtggaattagtcaattaaaattaactttcatattatcaatttttttccaattatcttattatatcattgatacatgttacgtttattcagtatctagaagaatggctaatttattatacgttatttgggttagtgcatataattgtacatttttattcttatatggattaattgagaaagttatatgtggtaatattgaaattacaattataacagatacgaatgatgataatgatgatgataaagttgaagttgaaactaatattgaagaattagtatcacaggaatatgttccgaaatcattatcctgcaattaatttaaattctttaacattattcttagttgctaatttattaactgggttgattaatttaactactaatacattggatgcaggtcctataaagagtatgggagaattggttttatatgaagtggttcttgctgtccttagtttagtactttacgataagtgggattgtcttaagatagtttagatagtttctaatgtatacaatttatagactgataaatagttattaagaccttttaagggcattaaacctttgttttagatcatccagttcatcaaactgtttgttttgtcttttactaggtggtttggatgttccatcattgtcatctttgcctgcatcttttgtatcatcctcctcttcatcttcctcttcatcatatttaccttcattgtactaaatctattctataaacatcacttaattcagagatataatcatttacaactgcatcttcatcatctccctcttaattttctaacaatctctacataaattttgtcttctaattctaatttcaattctggtttatcagtatcttgaacctctcccttcttccacttccacttcctctactttcatccttataatcaacttttttaacttcgcccttttcagttggtggtgaattctttaataagtaaggtaaatcaatacatttaactatagctgaagctaattttttcaattctttaacatcatcacctaaatattcttgagcaacaacaacatttctaataactttagataaacgatcaatttcttgatattgtaattctgaaggaagtttttctctactagcaggtgtattactactcccaaatccaaataatgaccaaccagaaactttctttcctctattattattactaccttcttgtattttagaattaattaaatttaattccctcttgtttatctaacattgaagataatgaatgtattgaggattctaaaactgccatttcaccaattaaatcttcccaaacatcagtggttctatcatcacgtactaattgagcaatgctcatacgtaaaatatctaaaccacgttcaaatgatcttgaattgttatctaattgtgataatttttgtaaatctggtataattgatgtttgaattgtatgtgttgatagtgcacgagatttcgttaacttaaattcaagtttactcttggtggtctttactaagatacgtaattgtgtgtctgtttgcatgtttgtttaatgaaagaagataagataagataaataagataagattcattaattaaaacatgtgctagtgtcgaatatatgatgtttcctaattaggtaatgtccaaaactcggaattcctaattaggaaatattaaaaaagagtaaggtattagatgtattagatgtatttaggaaagtattagatattaggacataaaaaaaacctagtattagtctatagatataaaagtagaagagcttttggagttattgaaagatcttatgtttgatggatgtttggtataggttttgccgtgtctgtattttgtctgtgtgggtagtactgtaacatcatcaattaacgacggactaccctctctactgaaagttggttttgttttggtgtgattgagagtttgtttctcttgttcattagagtgttccatttgttgtaatgacaattttgggtatactggttgagactgttgaaagggggttatttctttaaggtagttcaatgagtataaacaatccacattgttcatagtatcatagtcataattataattataatcatctttcaaatcggcgaatgatactgaaccattgaatctattcattatattgatgtcgtgtatgacttaatgttttaacattattattattaataatattattactactagtattagaaacattacccgtctcttctatttcattaccattcattaaaagagatttgcattgagaatactctatattaaacggctgaaccgtattgaactgaccattatccatattttgaacactattatcaggtgattctccttcaaaacaagtccctcaagggacgtcttttcaaagcatacccaccagcatagtcatccacatacccaccaccatctccactgtcacactctgcaacactacgcttcataccagcagttccagcagaggaaacactttgcaaagaactgtagaaacttctagaaaacgaaagaaatttttcggcagtgtgaaaattgtgacatgaaaaaatatcggagtttataaatataagtatagagacatgtatgtttcttcttttaaagtctccgttagggttccgctttgaagttatatcttctagaaattaaagatacaatgttacaaagacgtgcattattgcaaaattcaattgtaaagagagctcttactaagggctctccttcatcttatcaattattaaaatttaattcaaatattccaaatactaaaattaatacaaatactcaaaatggaataattccatttggaaagacttcaatcttgaataatgctagatccttccattcattacgtccattgaatgtggaaatgcgtatgaatcaagatcaacaggaagaacctgcattgaaaaaattcgcaactgatttaactgaaatggcctaaagagggtaaattagatccagttattggacgtgatgaggaaattaaacgtacaattcaaatcttatcaagacgtacaaagaataatcctgttcttattggtaatgcaggtactggtaaaactgcaattttagaaggtttagctcaaagaattattaagggtgaagtacctgaatcaatgaaggataaaaaagttattgcattagatttaggtagcttaatctctggtgctaaatatagaggtgaatttgaagaaagattaaaagctgttttaaaggaattaaatgatgaaactatattatttattgatgaattacatattttattaggtttaggtaaaagtgaaggttcaattgatgcatcaaatttattaaaacctgcattagctagaggtcaattacaatgttgtggtgcaacaactattgatgaatataaaaaatatattgaaaaagatgttgcattagcaagaagatttcaaccagttttagttaatgaaccaagtgtggaagatgcaatttcaattttaagaggtttaaaggaaaaatatgaagttcatcatggtgttagaattaatgattcagctcttgtaactgcagcaatttattctaatagatatataactgatagatttttgcctgataaagcaattgatttagttgatgaagcatgcttcagcattaagattacaacatgaatcaaaacctgatgcaattcaagaattagatagatctataatgacagttcaaattgaattagaaagtttaagaaaggaaactgatgaaatttcgattgatcgtagaaaaaaattagaggaatcacttgatttgaaaaagaaagaattagagagattaactgaaatttgggaaggtcaaaagaaagaattagatagagttaaaacattaaaatctgaaattgaaaaggctaaatcagatttagaaattaagagaagagaaaataattttggtgaagcatctaaattacaatatgatacaattccagcattagagaaatcattaaatgatttaattaaaaagcaggaggaacaaattaagaatgttgaaaatagtaatgaaggtaattccaatgttttattacatgaatcagttacatctgatgatattgcaagagttatctctaaagctactggtatacctgttcaaaatatgatgaaaggtgaaaaggataaattattatatattgaatcagtattaaagggtagagttattggacaagatgaagcaattgattcaatttctaatgcaattagattacaaagagcaggattaactgatgaaaagagaccaattgcatcatttatgtttttaggtccaacaggtacaggtaaaacagaattaactaaggcagttgcagaatttttatttgataatgaaaattcaattattagatttgatatgtctgaatttcaagagaaacattcaattatgagattaattggtgctccaccttcatatgttggttatgaggaaggtggtgaattaactgaaaaagttcgtagaaaaccttattcagttgttttatttgatgaatttgagaaagctcataaggatgtatctaaattattattacaagttttagatgaaggtaaattaactgattctcaaggtaataaagttgatttccgtaatacattaattattatgacatcaaatattggacaagatttaatgttacaagataatccaaataaggaagatgttatgaatgttatgaaatcttattattcacctgaatttattaatagaattgatgaagttgttattttcaataaattaagtaaagaagcattacgtcaaatagttaatttaagaattgatgaattacagacaagattagttgaacgtcgtattgaattaaaattggactgattcatgtaaggaatggttaacagagaatggttatgaaccaagatatggtgcaagaccattaaatagattaattaaacgtaaaattttaaatccaatgagtattttaatgttaaagggtgaaattaagaatggtgaaattgttgaaattacaacaaatgaagaaaagaatgatttagttattaaatcaattggtaagactaattaatttgtataggtttgtttacagttttttatttaatgaaagttatgagatataatctacatgaagaataatatgtgcctcagaataataaactgtcgtcactgctcctcaaagaagtatagcagaggagcatccgagcttgactcgtgtaaaacgtatcatcaacggtcacaaagtaataataataatattaataataataatagaatattttggttagaatcacacctttgacagtgattttctatgtggtaaaaaaagagagtccattctaacccaagtgagctccattgggttaccatttaatccttaagattaaatagcaatcgtcataactatcgtcaacgaaacgtaacgctatgcagaatatcccgatatgttagtaaaaattaacataacaaggtcataagaagttttacccacctgatgaagatgggataaacttctcgaagtcctgttaacgtcttctattcaataatccaactgaatgtaaaggatgtaagtatacaccaactattgaaataatgaaaactaattaactacaacgaattgtagccaggaaatgagtgtacaagactcatttaacgttaccgattgagatgatgtgccggagactttccccaagaccataaatgatgagaaaacaaaagtttctccttgtgtatgtctcgacagacgattcttgggctagaacaggctgtccaagagtaaacagaatgaaagagaggatggaaacattgaagacttataaagaagaagtagttaaaagaaggtaaaattcttcacagagagaaagagagggtttctcattgcgaattttgaaggttacatgattttcactttgcaagggtttttctcaggttctgtatagtgggttctgaaggtttttagtgttggacaatggacttggatcaggttttacagtgtgtcactacggctgctttgcctcagagaggtgctgaagcagacagcagcggagaatcagcttaaattatgggaatcagagaaaggtttctattataatttacaaacaatttatataacatcatcattacctttacaaactcgttggttagctgttatattgttgaaaaatggtgttgaaaaatactggagaccaactagaattaatgcaattactaaagaagagaaaaatgcaatgagacgtcgtgttttcgatgttttacaggaacctaataatcaattagctgcacagaatgcacatttaatatctagaatggcacgttttgatttccctaatgaatggccaactttaattgaagatattatatcaattatggaacattcagaatcctcaccagattttatgattataatgaataatttaatgactattttaaatcaaattatcaaaatgttagcaactgttagaattggtaaaactagaattgtaatgcaatcgaaaatacctactttattcccccatttagtgaagttttacaaactattctttgataaatggtgtggtgatggtataaataataataatgatcaagctataatgcaagtaggttatatgtttttaaaagttattagaagaatattagttgatggttatgcccatatgcatcgtgaaccaagtattcaagattttatggaattgacattacaacatttacagaaattactagtaattcatgaatctaatgataataatgggaatgaaaatttagagaaatatatcaaatgttatattaaaatgtattttaatctatcatcagagacaattacttcatttacattattgagtagttgtcaaaatataatgatgacaattctttcactattacaacaaaagaaattctcaatttataatattaatgaaactgaagatgattttgaatcaaagagtgaattttgggaaaaaataggtattatgtccattaaaataatgattaatgttacctctttcacttttgaagaaaataaacgtacacagatagtcaaacaaaagagtgattttaatgaaattcaaacttcaaaggataatcttaaaaatacttttttcacagttaatctaatagaaaatataacaactttattatttgatcattatttaaaattaagacccgttgatttatctgaatggacaactaattcaagctgaatggtttgaggatgatgttttctataattgggaatttcatatcaggaaatgtgcagaagttttctttgaagaattttctaaatatttcccaaccttaattgctccatttatattaaataaattaaatttaataaataactgttggtcttgattcaataacacaagattcaattttatgtatatttcaaataagttctgatttcttgaaaactcaatgtgattttaatcaattattaattgattgctttttaccattagcattttcaggtgattgggtattgaaaagaagagtttgtttaataattgaagattgggatagtgtgaaattaacaacttcggtacgttcagaaatttataaatatattgttaataaattattaactgattcatcaatgaatactgttgttaaattaactggtatgagaacattaaatcaattattagatgattggggttttgaaaaacaagaatttgttccatttttagagacaacattacaacagtatttacaattagttagagaacatgattattgtaaatatgtcttaaaacaattaccaacaatacttgaacgttgtcgtggtattataaataaaactattttaactgaaattattaagtatatggcaacattatgggatgaaacagatccagaatttgcatatcatcgtggtttaatgttaagagttattaaagaatcaattttagcacttgatggtgaaggacaagaattacattcaatgattgtaccaattataatgttatgttgtgatactaaatctgaattatatataacattaagtgaagatggattagatttatgggctgcattagttcgaattattaaaaataaagatgaactttcatatggtttagcaagtcctcaaatgatggaaattttagttcattcactaatcaatttaacagaaattttaccatctgttttatcattaattcgtagttacattttaatatcaactgaaattattaatggatcaattggtgaaaaattactagaagtaattgcacaatatttaccaacaatgagagatgatgcaattgtacttacatcatcaattttagatttttcaattatgcaacaagataatttagttttagaaaatattgcacgtagtggattattaaatgttatggcaaaatatattggatgtgcatcagaatcgagatattgtgaaatgaaaatttcaattccattattaagaattatgattttaagacctgatttacttttacaatcagtttcatcatttgaattatatttattattaaaacaattaagaattcaatgtagttcattatcacatgatcctgcaaatagaaaattacatgttttaggtatattatcattaatgagaccagaatttttaaatagtaataatagttcattacctggtgatgatattgaagtatcagttattttggaagaagttggagatcaaggtatttcatatgttttatcatcatttgctaatccgtttattacattagcattagaattaactgaggatataatagaggatcaaaatggtgatttacctgcatattctaaaatgtatgagggaggaattggattagaagaagatgagaattgtatggaatcattacgtattaaggctatatctaatggtgatggtaatattatacgtagagctaacttaatacaacatgttctcattgcaggttcagcaattggaaatgcaggtatgttaactcctgtacaaattgaagaattacaatcattacaaaataaatcatcatcttaagtatgtatgtgtcatgtatatatttttcttatcttatcttatcttactttataatacactttatcattcctttcgattaatttaatgttcctatttctataatgctttgcttgaatgataggatacctgttgaattagtagtacaagttttacaaaaacttgatgataatgatattatttctgtagctgaggcggggatagttgatttaagtaataccttaatttctgaatatattgcaagaaggatcaaacttactgcaattattaaaagtagaaacgatggtggataccgtttaatccccaagtatagttggatcatacccagtcatgtaacaaaactacgagtaattgaaggtaaagtaaaagaaaagcaatacttatcatcaattaatatatctgcaatggaatcattaaaatctattcatataacacataataatggttccaatttaattcaactattaattaatttaccaattaatattgaaattgttgaaattaagataactaaggctaattaagggtaaagtaaaagaaagttttaaaattaggaatccatcaacacttaaaatgttaacaattgtaaatacatgtatttggaatcaaagacgtgtatgtaaatctgttggttggacaagtcatgatttacgtgtagctgtacaatcaggtgttcgtcatgaaagtaatttattaatgagtttaggtgcaagaggtgtatctaatagtatgataatcaatccattcactaatccaaatactaatccagttaatgttaatgttaataaaaatggtatcattcgtaataataattcagataatgaatccatgttaatagctttgggtaatgttattgggaaaatgattatactgaataaggaatctgtacaaaatattggtgttttcggagttgatgtactttgggtatttaaaatattacttaaggagaaagaacctataaaattaagtaatattagattagtacgtgttggtggtgattcaatggcaagaatgtcaatttggacatcatcaatacttaatggatcaagaagattatgggaaagaaatgttagaatgaaaccaatggcagttgtatttagtccaatgctacataatcatgatcatgaaaattgtaaaatagttggagcaaatggtaatgcagtattagttgtaatggaagtggttataaattattcaaagagtatacttattacagtggatgatttgtttctgtagttttggatatgttgatttattatatataggttagattaaagtatatcatttaagtagatggttcaatatgatcataatcatcaatttctaattctgcatcaatcatatgattatttgaatcatattctaataattcagcatcatttttaacaatatctgaaacatctaatgcatgtaaaagttcagggtctcttagatttaagtaattcatgtttagcttcctcataatttgcccaacgtcttaaacgactgtttgattcaggccattcctgttctaattgaattggtgtcatttgataaaaatgaaactcacataatggatattttaatggtttactattatcaatttttaaatctttcctatgatcaggtattgaaggtaatttcttaacaatttcacaaattgcacctgattcttcccatgtctctcttaatgcagccttagcaaaattatcaatttcatccttttcaataccacctttcggtataatccaacgatctttatgttttgatgatgatattaataaaactcttttcttttccttatctaatataacaccacctgcaactaatcttgcattatcctttgaactataaacttgattttcacgaccttctcttggagttgaagttctttcaacaacgtatatctaatttcaaagatgttttctctggatcgattgtattcgttgccattggtaagaggagattatgattaacttgttgttcaagttattaattagagaaatttcaattgaacatcatgttactcctcggagttaaatggggtaatgttagttcggagataaggctattataaagtatttaacagtagatgtcgattaatagacaagtgtatatttataaagattataaagatataaagactataatagtatagatactattcatctgctaccagttctgtaaccagaagacattcccagacctggaactggcattgtaagaggaggatctgacataatatatccaaatgaaggtggacaagtccaatcaactgggacaaaagtttcagttattgctctttcatagaaatacctacgttgatttggttcagtaggtatcttgttgtgtattagtagtaaaattttcaggatgattcaccattatcaacttctttacgacataaaggacatgatgaattagttttcaaccattcaaatatacatggtctaccgaaaatatgttcacaaggtaattgaacgggtatatgagattctgatgggattgctgatgaatttgaaacttcctctatttgatcaatctctgttgaataagtatttacataagttgcagtagaaggttgatgggaacacttattgatggatcatcagataagtaacctggaattaatgatgattgagtgtatattatttgaaactatagttgaatctgatcagattcagttgaattagaattggaactacccttttcctctatttctgcatatggatcataacaaattggacatttccccgtactttccactactggtaacttatccagaatttcctgtgatacaccatgattaactggttcattctgtattgatccaacaacatttgctaatccactaactaaatttgaaatatttggattttcaatttgatttaaatttgtaaatgaaattggtgtattaccatcattattcattaaatcattaagtgaaaatgagagcattccaccggatatacctgaattcatgaaaggatttgacatttgttatttattcaattgattgtcaaaagaagaatgtaagtcttatactactactgattgggatcaaataactcatttactaagtaacttaattttttccatgagaatttactatgaggaagtcgataagtcgactaagttaactgttcttactgtacttgatctatttgaccattctaatggttcaatgttgttgaattattgattatatatatatcactacagattgaagttctattgcgtcgataagaacttactatttattatacattaagatatttaaaaataactttccttctttttttttaaaggtattgacttctaatattaacagccattccatattcctctcttggtaatgcagctaattgttgatctgataatcttaaaacttgaacaactaattcggcttcatttggtggcaattgtaataatttaagtactgtattatatgataaatctggccattttgattttggtaatcccattaaaactaatgcttgagctgctgcaattgctaattttggattttcatttaaaattgtaactgcttcatttgatgaatttggtgatgatagaaccattttaagtttagctaataattcaattaaaatacctggtggaattgttgataatgttgtagagattaaatcttgttgtggtggaattggtaatattggtaaatatgttgatgcattagctggatttaattgattgttcgttggattaggtagtatattcatgccgttactgttgttattattatttagtaaactattgttcatattattcatattcatcatattattattaagcatattattattcatcatattgttgttcatcatattattattcagcatattattgtttatcatattattacccatcatattattcatattcatattgttcatattcatgttgttcatcatattattgttcatattattcatgttattcatgttcatcatattattgttcatattcatattattcatattattcaagttattcatattcatgttcatattgttattattcatattattcatattattattattatttttaggtattatttcttgatttgaagttgatttagcaacaattgaagcaacttgatgtaaatccataccatttgctaacatttgagaaaccattttttgtaaatcattattatttcgtattgaattaattaaagttgataattctaaatcatcagtttcatcatcaatatcaccaatcatttcaggtttatttaacatttccattggtactataacattagcaggtaataataaacgatttaattttaaaacaggtttacgtaactgatgattatttcttaaaccttcctttgataattcaattcttaattttttccttccttcaattttcaattttgttaaaatattcaaagcattaagggcatcaataggggatgaatattctacaaaacagaaacctttatttttagaatgtgaatccatcatacaacgaacatcaacaattggacctgatccacatacaactgatttaataactggaacatcccaatgataaggaatagcacctatgtataaaacacacgatgatgacataattattattcaaatattttccggtggtaacgttgtttatattcttcctttgagagggtatagtacttgatattgttgaaataataaagaactactgttgatgaaatggaataaaaaaaaattttcatgttgaaaatttaaaaaagttttttttttcttttattagctaagttaagtgagggaaattgaaataattggagttgcgtctgccttctgattgttgattacatgcatatcagagtgattgttattgttatataagacataactatttgtagaaatatgaatgtactagagattaagaaaagtgtgggagttttggaaaaggctagaactcaaaatgatgtaaccaccttacgagaaacattaacacaattaaaaaccggtgttaaagcaactgagaaacttttacgtgaaacaaaagttggagttgcagttaataaacttagaggtcatgaagattcacaagttgcaaatcttgttaaagaacttgttaaaaattggaaagatagtgtctctgctgagaaaagagcacgtaaaagtgaaagtactggtagtagtagtaatactactactactactacaaagaaggaagaagttattacatcacaagtgaaggatgaacaagcaatagctaagaatataacaagttctaattctacaaaaccattagcaccacgaacaatgactggagatggtgttaaaccaaatattcaagatccatcaagatcacgttcaattggtgcaatttatggagcagttgcattagagactacattaccaagtgaagaaattttaaaagtttgtgttgatattgaagaagctgtatttgaaaaatatcaattaactgataattatagaaatcaattaagggcattaattatgggtattaaaaataagaataatacacaattaagaaataatatacttaatcgatctataaaagctgaagaattagcaattatgaaaagtaaagatttagcaccaccaacattacaaaaagaatttaaacaattacatgaaaagaatttatttgatgcacagggagctgttgagaaaagagcagttactgatagatttgtttgtggtaaatgtaaacaaagagaagtttcatattatcaaatgcaaacaagatctgctgatgaacctttaactactttttgtacttgtgaaaaatgtggtaatagatggaagttttgttagaagaggtttatattatgtgtacatattatatattattgttgttgattgtaatatagttattaataaatggttattgtagttacttacttacttatactaataatacatgaaaaatgaaaattgccctgtataatttggtataatttcctaattgggcaattcccactctccgctttgagtcatccattttcttaaattggttgatttttaatcaaattatttcaaattgcctcttttctataaaaggaacctctttcccacttttttcaaaatttactttcattcacttctttctttcttgtttttcttctctcttctttcttttatttaccaaaacaaaaatgtattataaagatgataaacactccataggtaattaaattcaagtattttcttttcttactaacattctctcttgattatcattatagaatcttttttgtttttcaattcagtctactttttctttttctttttgcttttttttttctttcaagtttacaattttacatttcagctttttcaattaacaattaaaacttacagtactaaccttatgaacaattaacaataacattaaaattaaccttataaacagtaacaattaacattaacattaacattaacattaacacttaccttataaacaattataataacattaacatttaccttatgaacatttcttataaacattatcaaaaactcttaccaaggacattaaccaaggacattctaattatttacaattaaaattacaattattatctactaactttaaaatcaatccaattgtaaattatagttgtttggtattggtattggtattggtattggtattggtattgttgctatctagttgctttgttgcttttctgttgttgctattattttggatttcaaattatgggttatggggtgggtttgctatattattattaattgctatattagcttattgaatattaaaaaaataaaaaaaattaaaaaaaaattaaaaaaataacaaaaaaacctaaaaaaaaatataatctttactatttaatctgctatcaaagttagctttattatattactattataaaaaaacaaaaaaataaaaaacttaaaaattatcaaaaaaaatatcaacttgctttccaatctgctatcaaagttagcttcactttattattattactataaaaaaacaaaaaaaaattaaaaacttttaaaaattattaaaaaaaatatcaacttgcttttaatctgctatcaaagttagctttattatattactattataaaaacaaaaaaaataaaaaacttttaaaaaaaaatcaaaaaaaaattatcaactggctatttaatctgctatcaaagttagctttattttaatcaattattataacaaaaaaataaaaaaaaaattaaaaaaaaattcaattgcttttcaactttcaattgctatcaatgttagcttaattataaattaaaaaataaaaaaaatataaaaaactttaaaaatttaaaaagaaatctttcctttatctcttgctatcaaagttagctattattattatatcttatcttataaaaaaacaaaaaaaaacaataaaaacaatataaaattcaaaaaacattaaaaaaaaagatcacaataaattccaattccaatttcaattccaattccaatacaaataaaattaaaaaaactctatttaaattcaaattacaattataattacaattccagttctaattaattacaattctaattaaaatttaaatcctattaatccaatcccagtgattaatcctatcaaatattattatgtaaatatcatgtaaatatcagatattatgtattattaagtaagtaataaatttttttttctttttttttaaaaaaatagtaattgtaatgttgataatagataagtagatcggcgattacctaaataggaaataccggttatcatgatgaatgttgaaattggttttcatgagtcatgttgatgatggtatgttactgttgtttcttcttgaagtactttatttagagtatctgaaggacgaatggaactctctggatatgaggcatgtatgccatcacgtactaatcatgggatttacaataatttcataattggtgcacaatataatgttgaacttgatcttccaaaaattgccaaagctgtaaaagtattatgtttgaaatatccacatttttcactaacagtcggtgaaaactatacatctgagtatttaaaagaatatgatattttaaattgtatagagattattgatgatttaagtactgatgaaatcttagataaatatactgattttaaattcagttatattaataagacaccattatggaaagtattattagatagtaagagtaatacattatttttcgttgttgatcattcatattttgatggtacagctggtaaaaatttccatagtgagtttagtaaagcattagatattgcaattgatgatggaactattattaaaccttcatttaaaacgtatcctaaggcaactgatttaatgggatttcaagaaagagaatctagtggtgaagtctctagtaaggctacatatcctcaaatggatgacaagttaatggaattaccaatgtatcgtcataatcatacaattaaacatttaaatttagaaaatacgaataaattaattaatttatctagaagtaaaggatttaaattaactggattaatttattatattgcatctaaatcaattactaaaagttttgaaaatgaaattgaaaatgctaaattttgtgcaatgattccaatcaatagtagatttaaagtccctaaaaatgaagaaaatgatataattactaaatttggattattctttggtaaatattttactactgatgatttaaattatattaaagaaaatgattttattacaatttcaagtaatttccaaaaagctttaaatgataatattgataaatgtatggaacaatatgaagtatttgaaactaatattaacaaagatagatcacttattgataaatcattccaacaaatgagagatagaaataatacaccattaacaactgttgcaatatctaatctgggtatgttatcagataataaaattggtttagtttattttgatcaatcaatggttgatgcagcatttggattacatttaatttcatcaaatgaaggattatcattaaattttacatctcatagagctgttcctaaagatgtttatcaaaattatgttaataatggtattgaaattcttaatgaattgttaaaattagaatagaatagaatagaatagaatagagttatggatatatagacattacgtaatttgaaaatatttatgacattgttttatgttgtgttgtatttgtattgataatgtagaatttattgtattattaaggattgtaatgtgttttgaaatagatataagtatatgagagggtagtttgtgggttgtatagtgtatgattgtttgttttatggcttgtattggtgatttggaggatgattaggggatttaattaatttgacgagccacctaaaaagtgaaaattggctattttgaagaatatcagggaaaatttgaaaactttacatagttaatttgtaatagatttttttacttatagaatagtcgtatcttagctgtatacgtattataatacacgtgttatcatagaaataaagagtgtgtgaatataagaaagaaccataggaaagaacatgaagcaaacggcattaaaggatgctcggtaataacgattactcttttcggataattatttacaattgatatgactcttgttcttaatacttttattcttcttatgatgtagagtagaacagagagtagtagatagaatagcgtatctcttatcttttcattgccagattgaaagagtgtataatacagtggctatataataaagtgaaaagattttacgataaaggaaaatttaaggttttcgtcattatgataataacaatagttagccgtttttccaaaaacaaagcagcaatcatttaaatatcaatgatcatcttctttttaaatctttaactcttataatttcttcttttaacaactttgaatgttattaattaatttacttacatttttatcatatattttatttacaactgcaacacctgcaaatccaaaactactccaagcattcttagattgtcttaaatttaataatgcaacaaattatggaattaaagttgagagtaatggttatttatcattagcttcaattaatactgattcacctacaacttcaacacctttccgtatttgtgataaaatgtttggattaggattttacgctagtttcgatcttgattatcatacttaccatgatggtgaaaatttgaaaagtattgaaaattttacaggtgatcagttagttgaaatgggtgttgtttcaagagatattgatgtttctgaaatgaataatataatggaaaatattttatcctcattagatgcaggagttgttgatatggaaaaagttggtgaattatttggtaaaccatcaaattaatattatgtattttatataatatataatgttttataaaatagtattttcactcttacaatgattaaacatcactttttggtatggtagatcttgactatgccgagtcattttccagattgtataagtaagggatactttcgtaatgagaatcataagctatctactttggtattagcagctgataagtctgtcccttccaatctttcatttttataattagttaacatattcaatgatgtggttgaaaaaacacctgaagctctccgatactttggtgatgatggtatgagaaaattgtacaaaagtcttaaagatgcacttaaggtctttgagaaatgcattctaggtaacattttagttgccaattataatggcattgaaagaactaaacaaattgatttgaatgatattgatttattaaaacaaattaaatcattggaaggattaaaaatatttgaaagattatttttgtgtttaccttgtgcattgtagatgtaaaattttcgagactaactgtttacctgttgcttctactggtattgtttcattgctgatggaaactggaacaacagctcataagatgtttgctattcaaataacaaatgaagtgaatggccaaccttcgcccaaggttgcatgttctccaaatttaactcaacgaaatataattaaagatgctgatatcatcatatatatgggatgaaataactatgactccaaaatctgtgattctcggggtagataagttgttaagggaggagaagaagaggaatgttccatttggcggttgtgttgttgtcttttcaggtgattttaagacagtgtttacctgtggttctaaataatccaagtatgtctgatgtttatgaaagaacgtttttgtgtttaccttatattcaagatgtaaagtttttgaaactaactgaaaatatgagaattatttttgcagttcgaccagagtaatcgtgctgtaaagcaacgacaagataatgcattactgaaaattggaaccggtttagacctatttaatggtaaagggcatgttgacctgtctttgttaagtgctgatttgattcaattctttagcatgtctgttttgtcttaatttttaacacaagtgtatgatcaaaacatatttcaaaatgtcaatcgtttaggcgatcctgtgaaattagatgagctgatgaaaatgtatgcttcaagttgtatattgaccccaaaaaaaacgttactgttgatgaagttaatagaaaaatgcttgggcgacttcctacatctgttgaaatcttgaaatcagaacaattgaagaggttacaactcagtttattagttaatggacacctcaggttaaaatttataagcccgataatgaacttcgtttaaaagtcggttgtccagttattttgttaagaaatgtaagtgcagaagatggattagttaacggaacaagaatgattgtcactcgtattcatgatcaaaatgttgctaaatggataacttgtcgaattctaacatcttatgaggtagatcttccaaggcttctttttcgtcataaagcaaatgctaattttccagttgaattctctccaattagagtttgtttctcaatgattaatctattatgtgtcattattgatggtttaaccaatttgaagaaccatccaggggtagtgatattaaccccccagaaagtacttgttccaagaagaacaacatgaagttaattggttaaaatttgaaaatagagaaaaacgagaaattacgaaataattttttttagctttatgtatcgataaatgtaataataacctgtttatacattatttggtaaaccatcattttaagattacatactttatataataatgttttataaaaaatttgtttaataataacttctattattagattcttatttcaaatattttataagttgggttgaaagacagtttcatgagaaaaactatgctgtcaagaaaatattttcagatcaagaatcgaagtattgaaatttttagcggaacaaggtattgaatctttaacaacgtctacatacactccggtatcaaacggtgtcgctgaaagggtaaacttaaccatcctaaatgatgtacgctcgatgttgctaagctcatcactaccatcctacttttggattgaagctgcaaattattccgttcatattagaaatcatatatattccgacaaattaagaagctcaccacctattgctgtgggttatgctccacttgatgtgagtaaggtgcatgaattcggtgaaaaatgttatattgctgatctaccatatggaagcaaaactgatataagaggatccactgcaatatacttaggtttattctttaatttaattgtgtttgtaccaactgtccatgggatgttttttaaatactcgtcatgtcacttttacaaagaaacctgagttatattttacttcaatttatgataaacaaatgactaactttacacacacattgcatgataaccctttatcactcaatattgagactgatattgactacaataataatattgaaaactttatccactttaaccctaaagagataaatgataaaactgtgattgatacgaatgaagaccatcatcacacaaatgaggtagacatagatatggatgaagatgatttagaagatgaagactacgaatttcatttctcgttggaaaatgatgatctattagatctcgctgcggtaaatgaaaatcagttaaaagaggatgttgaattcctcatgaatgatctattagactttgaaaataaaaatgaaaattcaaactcaagatactcatgatagaaggagacatcagagtgaaagagacgttgataatatggagaatctggttgaagctgctaataatcataggtttgatgaagtggataatgttgagaataattatgatatgaatagttttgatggttttgatgttccatctcaaatagtaaatgaaaatattgaaagagttaatgatgttcctatgacaccagttgcaaataacaatgatttcaattcaaatgattctattgaaacaaatcacagttgttgatgttccagatagagtaaaacgtcgtaagattgttgaagattttgtgtccgaggtaagctcaagtgaggaatgtgatgtaattgacgacttgagaaatttgattaatgaagctgatggtgtatcattgtgttgaaagctcacctgtgggaagaaacaatatcagagaaattttgattggaaataataattataatcaaatgaatttaatggatacattttcaaatgctgaggttgaattaatgttcagaaatgtattgcctaagaaaattgattacttccatactgcaattagaattgatatcaataatgttcttgatgaagatattccaaatattagaaaccatctgatggtttaaccaatttgaagtaccatccaggggtagtgatattaaccccctagagagtacttgttccaagaagaacaacataaaaataattggttaaaatttgaaatttgaaatttccactttttctcatttttctcactttatttaaagcattcaaccaatcatattcatttattctactttactaataatatcttatttattaacatttagtaccattaataacagtcgtaaagagagattactatctccatataatattgaaatacagtgtagggacataaatacttgtaaattgttgaaggatagtgaagtatacatatccggagttaacataacccaaatagtacacaatgattgggccgatctagatacatgcccagatactataatatatcaaaagagatgacaagagatgacaatagatgacaagaggtaacaaaaaaacaatccaaacactcctttaagataaaagtataagagcaatggaagggtaaagatacaaataaactttattaacatagagatctgcatgataaaggggttataagtgtttcagattgtataattgtaattgtagttggtatatgtttatcaattagatggttaacgtcatctcatctgcatattaagatcgtacgttatctattatataatatacacaccggatttatatttataattataattatggcatttcttaattgagtttatattattaaaggttaaaatgtatctaatattacctcttatcaggacaattacttaaactcatggatggtactggtactggtaaaattatttcactctatcctatactgtaacaaccatgaggttatcagcttttgagacgtttatgaacatacttgcatgtcatagaatttacaataattttatagttggagctcaatttaaaccaatacttacaactaataagatagcaaatgcagtttcaaaactttgtaaaaaatatccacaattttcattaactgttgctgatgatcatcattcagaatatttaaagaaatacaatgtaagagattgtattgaaataattgataattctaacccacaacaaatattagagaaatatactgctttacattttgattatcgaaatggaaaaccaaattggaaattagtattagattctaattcaaatacccttttctttgttgctgatcatacatatttagatggtacagctgctaagagtgcatatagtgaaatttgtaaatcattagatgatcaagatattgatattgataatattgaaaataatataattgaaccaaaatttggtccttatcatacatcagctgaaatgatgaaatttgaagagagatcaattgatgcaaatcctaatgtaggtacttctccaccattagatcattcattattaaattcaccttattataaacatacttatcaagcaattcatttaaataaggaaaaatcagaaaaattgttgaaaatagctagagaaaatggatttaaatttactggtttaatttattcaattgcaagtaaagctattcttaatagttataaagatacaggtgaatttaataaattacgttcattaattttaattaatagtagatttagaattcattcaaaggctaataaattatttagtaaatttggtttatttttcggattttattatcattatgatgatatttcatttgttaaaaattcaactatttcagaaattggtaagaaatttcaaatgatttgaatgaaaatatggataattgtcttgaattttgggaaaatttagaaactcattcattaagggataaatcaattattgaaaatgcaattaatagtattaaattaaatgattcaaaaccaactacaacattagaaatttcaaatattggacttttaaatagtgataaaataagtaaagtttattttgatcaacccatgtttgattcaggcgtttggattacatttattctcttcaaatgattatacttcattaaattttacttctcatagaggtctccctaaggaaattcatgaaaagtatgtcaataatacaatgaatattataaatgatttattaaataaatattaagtaagttatatatactctatatacaatataagaacgttaaactaatacttacgttacagtggtatcacccaaaggtaattaagtttagtataatcaattaaactttaccaacaggggtatattttgcatacggggtgcatttctccgttgtttgctatgtttcaaatatatagttatagtctaagcttctgattggtgagttctagaaactatagccaactacggcatttcttatcatcttataggcgatgatcatcgagtttaataggtccaagacaaattacggaaaaactatatataagttcaataaaagtaccaattgttataataatatcaaattaatgaatattttgaacgacaaatggtattatcagcatttgaaacttatatgagcttgcttgcaagtcatagaatttataataattttattgttggagctcaatttaaaccattaattaaaccaaataagatagcaaatgttgtttcaagactttgcaggaagtatccacaattttcacttactgttggtagaggtcatcatcaagaatatctgccaccatatgatgttaaaaattgtattgatgtaattgataattcaaatcctaataaaattttagaaaaatatactgctttaaagtttagttattctgataaagttccattatggaaattagtacttgattccaaatcaaacactcttttctttgttgctgatcatacatattttgatggtacagcagttaaaaaagtttatcatgaaatttgtaaatcatttgataaacctgaagatgataaattagaaaatagtattattaaaccaaattttgaatcatatccaacatcagctgaaatgatgaaatttgaagataaaatagttgaaattgaacccaatattaaaggttcatcacctgaaatggatgttgaattattaaaattaccatattataaacataattatgaagttgtacatttaagtaaggagaaaagtaaacatttgattaaacttagtagagataatggatttagaataactagtttaatttatgctattgcaaataaagcaattgttaatagttatgatcataatgaagaatttgaaaaattacgtacaattatagcagttaatacaagatttaaaattagtccagaagttgatcaaatgttatatgaaatgggtcttttctttggtatttatactcattatgatgatatttcttatgttaaaaatgctgatattttcgaaatggctaaaaattttcaaaatggattaaatgataataaacataaatgtaatgattattgggaacatttagagacaaaatctaaaattgatagatcaattattgataaagctatacatgaaattaaattaagagattcaaaacctttaaatacattatttatttctaatataaatgttataggtgatgataaaattggtaaagtttattttgatcaaccaatgtttgatcagtgcattttcattacatttagcttcatcaaatgatggtatgtcattaaattttacatgtcatagagcaatacctaggaaaatttatgatacttatgtttccaacgttttgggttatataaatgatctttaaacttttataattacattttttaaactttaaaatatattctacttatctttaattttaggtttcatcatgtcatctacaattttgacatttaaaattgtattcaattagactaataatgcttttttctttaaagttagtaagttattatgcttttcaatttgttgggcaaagaaacattcatgaataaggtcagaagtagttactaaatcattgaatcaaaaataagataatttatcactttagaggatttatcggagtttccgtaatagcggtattaagaagaatcaatatctcaatactgttttcttatcatagataataaacaatcgaataaaacgcctcttaatcgcagatcaacattatttacaaatgccaagtaattcaattattaataaactatagtggtctgagtttagaatttttacaattactaaacaataaacaatagaaactggaaagtataaattcaaactttatcaacaataaactatattttatagtgtttagctgttttaaattacagaactgaaaaatcattcaagtttagcaatcaaatatattcatattcatcatcaacgttttgttatctaattgctatggttagttgagtgggaaataagatcgtacaatattatataaatccagcaaatgtaccatgaatgaattaacatactataaactatcttttttttgaccaaagatggtattatcagcatatgagacgtttatgaacttgttagcaagtcatagaattttcaataatttcatcattggagcacaattcaaaccattactcaagccaaacaagatagcaaatgtggtttctaaactttgtacaaaatatccacaattttcattaactgttggtaaaggttatcattcggagtatttaaagaaatatgatgttaaagattgtattgaaatagttcataactctacacctaatcaaattttagagaaatattcagcattaaattttaattatgcaaataaaactccattatggaaattaatacttgattcaaaatcaaatactttattctttgttgcagatcatacgtttttagatggtacggctgttaaaaatgtttacaatgaaatttgtaaatcattcgatgaagtggaagatgataaaattgaaaatagcgttattgtacctgaatttaaaccatatccgacatcagctgagatacttaaatttgaagaaagatttgcagaggaaggtattgttgttgataagggtacattcccggaaatggatgaagagttgttaaaattaccatattctaaacataattttaatattgttcatttaagtaaggaaaaatcaaattatttgagacaattatgcagagataatggatttaaattaactggattaatgttttctattgcaagtaaggctattgttgatagttatgttcataatgaagaatttgaaaaattacgtacaatgattgcagttaataatagatttaaaattagtccagaagttgatccaatgctttatcaattaggtcttttctttggtattcatactcattatgatgatatttcttatgtgaaaaactcaagtatttttgaaatagctaaaaattttcaaaatggattaaatgataataaacatagatgtaatgaattttgggaaattttagaaacacaagcaaagaatgatagatcaataattgagaaaagtattaatgattataaaaataaagatggaacacctggtactacattaactatgtctaatattaatgtattaggtgatgataaaattggtaaagtatatttcgatgaaccaatgtttgactagtgcatttggattacacatggtatcatcaattgatggaatggcattaaattttacatctcatagagctgtacctaaggaaattttcaataattatgtgaataacggccttaaatgtataaacggtatttgaaaagtaaaagtaaaaaagtataattaagttctttaaaaccgtttaatgtaagatttatccgcttatcagttgttatcgccagcttaatatttcctatttaggaaatttccgatatatctatcagatctatttaaacgactggaaagtacgtttattcgatattaaatattgtaaatcttagttatttaccaaccgactatgttgttatcagcatatgagacgtctatgtgcgtaagttctaataagggattatataataatttcataattggtgcagaatacaaggaattattatcattggggaaaataatcaatgcagttacacaactttgtttaaaatatccacaattttcacttgctgttagtaaggattatcattctgagttcattaatgagtatgatttaaagaattgtattgatattgttaatgattcaagtattgaggagattttacaaaaatacacgaatttaaagttcaactatgctgataaagtaccattatggagagtagtgttagattctaagacaaatacattattttttgtagttgatcatacttactttgatggtactgccggtaagactttccatgttgaattttgtaaagtattaggtgatgatgatattgttgaagatagtattattagaccaaaatttgaatcatatccgacatccactgaaatgatgggatttcaagaccgttttgttggaagtggtgttattgataaaggtacttatcctaaaatggatgaaaggttaatgaattcaccttatttcaagcataattatcaagttgttcatttaagtaaggaaaaaaccgataatttagtaaaattagctagagataatggatttaaactgacaggtttaatgtattctattgccagtaaagcaatagttgatagttataaggatgaagagaataagaaaatacgtacgatgattgcaattaatagtagattcaaggttggttcacaaattgatccattattttataaatttggattattttatggaacttatttccatatcaatgatatttcattcattaaaaattctgaaattattgaaattggtaaagatttccaaaaaggtttgaatgaaaataaagataaatgtatggaagattgtgaagttttggaaactaaggctaagaatgatagatcaataattgaacaaagtcaagatgatatggcatcaagagattcatgtccattaactactttaactatatccaatctaggtgtacttaatgatgataaagttagtaaagtatattttgatcaacctatgattgattcagcatttgcattgcatttaatttcatcaaatgattgtattgcattaaattttacatcacatagagcaatacccaatgaaatttataatacttatatttctaatgttttaaaatttataaattctatttaagtttatcataaatatatttaccattagtcatttcctccaaaatatccattactttatcaactacttgatcatcaataatttcaaattcatttggtttaaatttacttaaaacataatcagcaacaacaccaggttttgttctatcaccattataatatctaccaatacctaattgtaaacctgtataatttttaccaatatttgaacttgcttgaatatcacgtaaaccattatgacctctatgagatgaattaattttccttattttaactaaacctaaatcaacatctaattcatcaaataatataactgtttggaaatcagtttcttcacctttaaatttatttgtaaattctttgaaaaatggtgtaactgatttacctgataaattcatataaccaggtactctataaaaccataaatttgtatcattaattatatgatttgaaatttcaaaacgtccaatacgtgttggcattgatctatacctattttgtaatttatccaatacataatgaccaatagaatgacgagtaccattatattcctttggattaccaagtgataaaataagtaaattagttggtttacgtattggttgctttggaggtttaacttttttaacttttttcactgcaggtgtagtaggtttggaagttggtggagttggaggtttaggtggaatagttgaaaagaaacgacgagtgaatgagttgaacatattgtataagtagttatagatgtaaattaatggattccacattggataaataagaaaagagaataacaataacaatatgtccaatataggaaataattaacgaaattaagttaaattttcatgttggtggattaatatatcatgttgataacagttgatctcttcttctttttctttttaaagattatatttgacaattaacaaccaaaatgtttaatccattagcacaattaaaacttataagtgatgaattaggtaaggaatcaagtgatgataataaattaggtattattcaagcattaggtataaaatttttatttgcatttgttttagttttctgtattttcgtttatcttgataaaacatcatcattaaatggacgtagtccagaggagaataagaaattacataaaatgggttataaagaggaagaagtaaaggaagaagtaaaggaggaaaaagccgttggatcaagtacaggtgttagtaagggtaataaagttaagaaatctcgtaagttataaacagtatgtattatatagatgatattagttctaatagaatcagttaatttgacattttatcacacaatatccttgctaattaactagtattgatattaaagaatctaaattttatgccataatcagtctaatgattgaacaaaataaattggcgtattacaatatgattcaaaagtcaacaagatgggttaaccctaatactaactcagctatgaataaatcttttgataggcaatctcattatttatctaaagatttgttgataatcaaatttatattgaccccatcctgttgataatcgttgttgagtaaattgctagtttctaattacgtcataaaaatacgataagatgagtaagataattaatgacaattaataatataaaattacaaaagtaaataagtaaatgttaaataaaaataaagtttttgtttggaagttgaatagaaagaaataaagtagtaaagtgaaaaaagtagataaaaatgtaattgagattaaaattaagcaacaacttcttcagtttcatcttgatcatgattagcccattcaccttcagcatcaacttcaccttcagttataccttcaggaacagtataaacatcatcaataccttgatgaattgataataaaggttcctttaaataagaattatctaaagtccaagaagttaaagaattttcacaatcaataataatttgctttgaagcttcataaccatcataagcaggtcttgtttcaccaggtgtaacaggagaatcatctaataattctaaaagtgctttaccataaccagcaataagagccattttttcacttaattctcttaaagaatcaaattgataattaaatgaagcctttaatttttctcttgtaatatttgataattgagcttctgcaactaaagattcagcttcagctctaactaattcttgttctaaaattgaaattttaggagattgaggatctttatatttaagatgagcaatttcatcagtaattttaattttacgatctcttgaaggttgaactgaaccttcaatatttctgattgatttgagagtaattctgtataaatcatatttatcaataaattgatcttctaattcaccaatttcatagagaaggacaccaattttatcagtaacatcagagacatcatcatcattatctgcaccccaaagtgataattgttttgcaactaattttctttcaacagagacagcttctaatgatctttccaaagatttttcaattttaattaattgagataattttctagccatttcaggaccaaaagaaccagcagtttgaattctaaaagcatcagcaattgaagttgtaccgaaaaatttaccctttgttgaggaaacaggtggaggaggagttgcaatttgagcagcagttggagctcttgaagatctcatagaataagttctatgcattgtttatttgagattggtttgttaaaagaaagaaagagtataaagaacaattaaataaaagaaaaagaggtagtcaattagataaatatcatacaacgccactagggaaagacaattaaattattagacaattaaagttcatccacttatcagcagaaaccagccttagggaatttctattattttcatttacttcccaaaagggaaatgggcggttgcccttttgggaattattatcttattacgtaattatattacgtaatacttgcttatgtaatagtcacgtggctgattatgtaatatatcacgtgacacgctgcttacataatttcgttctgctttctcttattactactaatacattgattaataactatctgataaccttcaacaactttaccataaacttcctctaatttacttctaatatcttcaatactcaatttcatctcaattaatgaatctgcatggtttctgtaaactcttgtaaatatcattttctttaattctttactattttcacctcctttacgtaattccatcatttccattatacgatcattttgtcttttagttaattttaaagattcaccactattaccatccattactctttgtaaatcaactctatcacgaatttcatccattgcctcattaggatcttcaattgtaatttcataacatttaaaatctttaatccattcatttgtaataattttataaatttcaattccatgtcctttaccttgaaatggtggtaatataactatttgtgaaatacgtcccctatatggatatccttctgtgttattatcaaattctttactattgataaatttccaatatttataatatgtaacaaatccaataaatatatccttttcactgttactctcatagataaaatacccaccccatcttttatcctttaaatcaatatatgatccaccttcaataaataataatgtgaaaatttgactacgtttcaataatttatgtccaatactttcttcattgtataaatcttcaaatttataaactttatatttcttaccatctctctcatattcattaacaattttatcaattggtaattcaaatccactctctttttcctcattttcaatactttcaatccatttactttcactattaattatataatcacccttatttaaaaatttactcattatatcttcaatatttttaacatctttacttaatttttccttatatttaacaactaataatgttttcaaacttttacaatcaaatgctaaatcaatacttaatcctttatatccaaatatttgttcactttcaccaaatattggatatgtaaataatggttgaaattttaataatttatcaggtaatgctaatgataattttaatgtatccgttgatccacatgtccattctcctggttcaatatctaatccattcattattacgtagctagttttagttacttactttaaacaatactaatctttatatcactgaataatctttcctgtgaaagtgtaactttaccactactacctaattcaagcaaatacataaatttactaacaactaaaccgcgagtttcaccatcgacgaggtctttaaataaagtctcctcatgttcaatcctatgcaacatatcctctttaccttcattatctaatgatatatcaatcattgcataattaccaatatcttcaataccatcatcgacaataatatccttttcaggcaattcgttattaatctcaaaatcaaaatgaaatgaactactgtgtcgagtggtagctctacgaccttgttcaatacttgaaactgatgatgatctactatgttgtctactatttggtaaacttggaattgaagaatttctaccaattctaccatattcaatatccatatcataaaagtcattcattggaatatcatgttcgtcattattaatatgattattatcatcgtcactaccggtattaaatatatgacgatatttattaatatcagtcatttcaccaacacgtaaatcaaataattgaatattaaatttataccgttttaacattttatcttgttcaattgaaatatatccatctcttatcttcataatagtttcactatttaacataacatctttatcaattaataatttacgacgtttatttgatctcgtttgtggtggtttagtaggtttctctggctgagcctcttcattattgatttcaggttcatttccagcaacatcttcattcaaatctaattcaatatcattaatatttatatcattaataaatccaaaatccatatcaaatgcatcaatattatcattaaccatttgttcactaacaacactatcattaataatttcatcactctcattcttaaacataacatcaccatctttattaaattcaaatccaacatcatcccatttctcttgtgtgaataattccctatctacaaccatactctcatccatttccacttccaattcttcttcctttttctccatatgatcatcccattcttcaattaaaccttgtgaaatatcaaattttggatcatcctttaataaaacaacttgatcaaatttttccttaattactattttactctttaattcacctaatctttgaattaacattctacaactactaacttcattccaatcattaatacattgtttcttaaatgctaaaactgtaccatacattaaattacttgttcttcttaatggtattttatcactaattaaaataatattttcacatgttttactaatatttataccattaattaatttcttattctttttactactatccagtgtagcaagtaaccaaactgtacttaatgtaggatcttgatactctaattccatttataaaaagaaaaagttatacaagaagaaattagatgagccttcgattttaaatttttataacggcaattgtaccaccaatggctcccactataccaattaccaccattatccaccacactatcttctctctaattggtatctctggaaatgtatggagatagtagagacatggtaatgtaagacaaactgtaaaacaaatcagactacctaataatgacattactttaccaaaatttgttaacattgtagtagcaattaagaaaactaaacttaataaaattctattaatcaatttattattaattttactatctaatatagtcactattggacgactaattaatggtaatttggaaattggtaatattgacattaatataacaattaattgtgaaatccaaattggataatcttcattaattaaaatatttttagttatttcatcttcaacattattaccaaacattaaaaatccaaaaacaccagtaaggaaatccatcatgaatgaaaatgtgaatgaaatattcatacatttattaaatttgctaggttttaattgatctttaaaaatttcagggaatgttgcatgtccaccccatggtgccatgaataatccgaatgagaagaatacatttttcaatgaatttggaaataaattggtttccattggtgttaataatgaaccgggggaaacagttttagataatcctgcaattaaaattgcaaaacatgtacaagttgtacaaattatacctaataatgataaaaatgataataatcttaacgggaggaaattcaaaattactaataatgaacaaataaatacttttaattcaaattgtggaattgatggtattatagcattaattgaatctgcaaataataaaatcattgaaatacctgcaccaattaaatctaatgtgaatataattaaaatgataaatccaatattattaccataacagaaaatcccaatatcttgatatgtctgtaattgtggatatttttccaaaattttacctaataaaacagctgtttgtttagtacttattgatgcaaataataatgttatgataccaattacccaacctgataaatgtaatgcaagtggaatcgataaaatacccagtcctataagaacattaactgaattgaaaattgtctgtgttggtgtagattttaatgaaattataacaggtcccccatttgattcatgaatactattacttctactaatattattatgacgaatattttgaaccatatctttaatactatcagatattgaaactgcatcactattaataggttctctagtagatccataattaggaatataatcttcaacttcatcaattattgtatcaatagtttgttcaccatcattttcttgaacggtatcgtgtattggtgaattaagcttagaatcgaatgatttggaaagataatcaactgatctttgaacagatgatgcaaaattgtttattgaacctgcacctcctgcatctaataatgaattccttcgtgacatcttgagtgatagtggtaaagcagttgaagataaagaccaagaccctaagttatcgtcagcagataacgaaatcgacgaattgaaatttttcttagcgctggaaaattatttttcaaatcgccaaatttgacatgctaagtggtatatcgatctatattactctgctcttggacaatgttgagaactgctgtgaggagtagtcggaatggtgtgattaaacctttctttgctagatacaattctactaatgtagattactctaaaactatcattttacctcaaacttcgttcaataatagatctgatgatactttaatcaatgataaattattacctcaaacaactaaaaaattatatggttggaatattaatagaaaatgtaccgatattaatgatcttttcatatttcatgatggtcccccctatgctaatggagatttacatattggtcatgcattgaataaagttttaaaagatataattaatagatttcaattaatacaaggtaaaaaagttcattatgtaccaggttgggattgtcatggtttaccaattgaattgaaaactcttgaaaaattatctaaggaaagaaaagaacaggagaagttaattaagaaagaaattaagaaatcaaaggatgaaaatttgaaattggaattaaagaaaaaattggatttgttaaaatcaactaaattatcatcaactgatattattaaattatcaaccgaacatgcaatgaatactcaaaaaagtcaatctgaacaatttcaacaaatggcaattatgggagattttgaaaatccttatcttacattgaaaaattcctacattgttgatcaattacgtatttttaagaaatttttcgataatggattagttcatagacaagaaaaaccagtttattgggggtgtgagaattcaactgcattagctgagggtgaattagaatataatcatcaacatgaatctaaggctgcatatgttaaatttccaattgttcaaataaatgagagattaaggggaattattggtgataaaataattaatgaaggtattagtgcattgatttggacttctactccttggactttagctgctaatttagctatttcaattaatgaaaaattcaattatacaattatatttaatgaaaaatttggtaatttaattgttgcagttgatttattacctgaattagagaaaattattgtatttgaaaaacttgaaattgaatttactggtgataaacttctcaattgtggttataaatcattagttttaaataatgataaaacttatccattcattcatggtgatcatgttacaagtactgcaggtactggtttagttcatacagctccaggtcatggtcatgatgattatttagtttgtttgaaaaataatattaaaccttattcacctgttgataaatttggtaaatatactaatgaaattgatgaaaatttaaaagattttattggattaaaagtattgactgatggtaatcttaaaatgatcaaattattggaagatgttaaaggacttgtatttttaaatgaaaaatatattcattcatatccatatgattggagatctaaaaagccaattattattcgtgcaacacctcaatggtttattgatgttagtaaaattaaggataaaactattaatgcattaactgagaatgttaatttccatccaaaacgtggattaaatagattaacatcatttattaaaaatagaaatgaatggtgtatttcaagacaacgtagttggggggttccaataccagttttatatcatcgtgaaactggtgaaccattattaaatgatgaaattattgaaaaaattatttcaattattaaaaaggataatattttagcttggtttgaacaaattgaaaatggtgaaatttcaattagtaaatggttacctgaaaaatatcaacatttatcaaatgattatattttaggtacagatacaatggatgtttggtttgatagtggtagttcatggaaaactattgaaagatatcttaacgaagaaggattattaaatgatgccaagaagagaggttattattcagacatttatttagaaggtagtgatcaacatagaggatggttccaaagtagtgttttaactaaagttggtacattggaagaaaacagtgaagttattatgccatataagaatattataacacatggatttacattagatgaaaagggagagaaaatgtcaaagagtattggtaatactattttaccatttcaaattcttaatggtgataaaaataataatatacctaaaattggaattgatggattaagattatgggttgcacaaagtgattatactaatgatattaatgttggaccaacaattttaaaacatgttggtgataatattaagaaattaagatttacatttaaatttttacttggtaatattagtggaagtagttttgagaatgatattgatgttagttcattaccattattagagagatatattttaagtagattgaattgttttgagaaagaatgttttgaagcttacaatgaacatagttattataaagttgttaaaagtataaatcaatttgttaatgttgaattatcatcaatttattttgatattagaaaagatgcattgtatactgattccattgatagtgagaagagacaattttcaattaaagttatggaagaaattactaaggttttagtatctgttgtgtcaccaattactccaattattgcacaagaagtttgggacaatatgccatcaaagcttactcttggagaaccaacaccattccatgctggttggaaagtaagtaatgataataatgagaaacttgttaaatatgatgaaacaattgaaactcaatttaaggaaatactgaaattaaaggaaattattaatttacaaatagccaatttaagatctcaaagaattattggtagttcattagagactgaagttcatataagttctaaaactattgaacaattacaatctaaaataggtaaaagtgatttagaagatattttcgttgttggtagagttattattgatgaaaacactgatgatgagataattgtcagtaaatctacataccataaatgtccacgttgttggaaacattcagttgaacctgacagtggtcatgaactctgtcatagatgtcaatcctgtgtataagaagtgtatataagacatgtaaatagagtaaagtaatgaatagacgcgtcgtgtacatgtgcaaagtctttcacttgaagtagaaggttgaatataggttagtatctactagacactgcttctagagacagtacaatgtcattccagaatcaatataacgagtatcaacaaaccatacgtgccttacaggaacacatggcaactatttcatcacaaatagctgaacatcgtgttgttagagagacattatcaaaagtaccacatgatagaaaagcatggagattagcagatactgcaatggtagagactaatgccaaagatgcaggtgaagtattagatgaaaaacttagaggattggaacaattacaggttaaacttgaagaagaatgtcaaggtgttcaaaaggaatttgatgattggaaagttaagaataatgttaaaattgtacgtgggtagtgttcataatgatatatctaatttaatttaatttaattaatcattgtatataatagtataataatataatatataaatctattttgtatcttcagaggtgaagaggaataaaattacaaatattaaccatgaagcaataactgatccaagaccagctaaataaacgtatgaattactattttcccatgatctaccatgttcatcctctgctaaatgtctaacagtgacaatatcttcagcccttaaatatgttaaacctggtttcctataatcgattctaaatgtgaaaataccaaattgatcaggtaatttacaattaatatgatgactaccatttcctaaattttccatctttaatctttggaatggatctaacataataaattctaattgtaatgtttcatttgcaataaatggaacccattcaccatttttaagttcaatcattgaaaatttaacatcagttaaatcaccttgtttataaaaatcatcttcatcaacaaaaataatttcattaccttcattatcgacacgtttatgaataaattcattaactttaattacacctttctgttggaaagtccattgaattatttcattggtaatttcagggtattcgaaaaggatatttttactaccaatccatgtaatacgtccattattacgaccttgaaatgcaactgctaaataaccttctaatcctgtatgccatggaatatcctttttagatgatttatccttagaaaatgaacttcttgatgtttgtaaaaaaggaattaagaattcagaattggaaatgagtgcaactgatggatcctttaatgtaatttccatacctgtatcttcatttgatgatgaaataatgtattcatttaagaattgatttgaattgatattaacattagaatcactattattattatgataatcgatatatttataaccttttggagatggataaataccaatttcatttaagaacagagtattatccaaattagttccattaatactatcacttgtaatgattatattaccaccattttcagcaaatgaaagtaatgatttataatcgatattagtacctaatgatttagccttgtttgataaaatgactagattcttgtataagagattaccattaatatcatttaattctaagtcattatcattggcttcaattgagatgaaactttgaccatttgatgtaattatatcagtaattgtatcaatattgtaatcattgtcttcaatatcgctattatcgtgtataacaacggtatctgcaatataccccaatacagagggcactagcagtgataagaatgtcaatggagatgctaacttcattgttacagtgtacaatccaggaagaatcagtggtaaaagcaagtaaacttacagtatattaatctcaaattgaaaaattacatgacacatggcaactttctaaatttcatgcttttactatgtatacaaaactttttttcatctgttttgtttctttgtacaaggggaatggtagtatagaggtatagtatagtactattacaatgatatcgtcaccttctaatgaggcagcagaaattgcatcaacttatgcacaattaaataagggagaggaagcagcaagtaaaatggaaaaattattagatcaaattgaaagtaaaatggaacaaattgaacaaatgcaattacaaatggataataatagtatcaaagataataataatgataatgataatggtatttttgaatttaggaaattaaatgatgatttacagaacttagaacgtgatatggttgatattcaagaaagtatgcaactggattcaactcttgtaagtaaagagtgttaatggatgctaatatatgcagtatatctgatagttggtgtcttattagagaatttgttgacttgaaatacataataaagtacttagtgtcatcattttagttgattattattggaatgggatttaaatacgacacattaacgttaattaacaacactaataccatcagagacgttctttaccttttcaatacttttaatatacttattatatacttatatttaacactaattgtaacataaatcaaacattcactgcttaatcctagaaccttacgtaacaacggaaattacccagccttaaagaaacgttgcaatgttgatcttctaaaagttatagttgcttcttttgccatcgattgacaatgggtgttgaagatttaggtgataaggttgtacttacttcaagtaattcaactgctacaattttaaaatacggtgcaactattatttcttgggaaattgaaggtgttgaacaattatggttatcagaaggtgcaaaattagatggttcaaaacctgttagaggtggtataccattagttttcccagttttcggtaaatctaatgaaacaggttttgaaagtttaccacaacatggatttgctagaaattcaacttgggaatttttaggtcaaacaactgaaaatcctccaactgttcaatttgcattatcacctgaacaagcaaatgaagaaatttattcaaaatgggataatggtgataatgattttacattatttttaacaattcaattaaataatgataatttaacaacttcaattgaagttactaatagtgattcaattaaatcttggaaatttaattggttattccatacttatttgaaaattaatgaaattgaagatactttagttaataatttaccgggtgaattatgttatgatcaaattattagtgaaacttataaagaaagtcatcctgcaattgattttcatcaagaattagatagaatttatcaaaatgtttcaactgataaaattattcaagttattgaattaggtaaggttgttcataatgttcaaagagaaaatttacctgatatagttgtttggaatccttggattgaaaaatcttcaaatatgggtgatttccaaccaaaggatggttatcataaaatggtttgtattgaacctggtcatgtaaatgattttgttgaattaaaaccaggtcaatcttggtccgcaaagcaaatcatttataaaggtgatgtaattaaattacaatctatttaagttatgatagtaattgtataaaatttgtatcattaatgaatcgtttgaaaactttttaaatttgacttatattattttattttttttattttaggttattattacttgcttccactttggatactttattttgatacttattttctttcaaagttttaccacttttgtctagccactacttagagagaaaaaaacagataccagactttaaaaaaaggcagaaaatttagaattagatcttaacatgcattaaatctgtataaaattgtttctagaaagaatttcagttgttataatatgcaagtttaattgatctatatgcatctattacccttttaggtaactttattgcatgaatttgttagaaatatacctcaaataacagaagacatgacacaaaaaatgaccatttgcccaaataggcaatttgtttttcccaattagggagcaaaaccattttttcatattctaaacctatttttactaacaaattttacaattattcagaaaattcaataattacaggttttgttagcaactggaaaactataaaaggagacatcttttcctcttttatgaaatttatttttaacactttaccttaacttctttctttctcttcttttagcagttagacctctcgtttcactgaccgccttaatagcaattgcattttcgccttttgcttatattttcattttactgattttttgttcattgctgaatttcccaattatttgcttttttttgttagcttgctattaaattttgcttttgcttgaattttttatttttaagaatgtcttccactacttttgtttcctctgatgatgaatcacttaattatttatttgaagaatctttatttgaagatactactactacttcttttgaaaatgcaaattcatcaactgatgatgatgatttgacagttgatgaagtcgcttatattaatgaactttgtgaagagctcgaagaacctgtaaaagaagaaaaagacgaagaaatggaaaatattaacgtttctgaatctactaataatactactactgacttgactgcagctatcgttgatatcaacgcaggtttagatgagtctgaatatttgaactttgatcttgctgaaactttatttgctccaagtgatgaaatttacactatggaaactggttttaatgaacttgatttagatcaagcaattgctttccttgatgaaaatgaaactgtcgttgaaccaacagatgatgtttctgaattattatttaacccacaacctgccgttgttgatgtttcaactcaaactgtattggaagaacctttatcattaccaactaatgaaaattcattaatcctctctgatgaagaacttcaaaatattcttgataattttgacgttgaagctattttcaacaataccactaataacaatgttactgatattgattatccatcaacatcaattaatatgtctcaattagaattggttccacaaaacgttccacaacatgttgcttctactgaaatgaatacagaagcttctgtctctgaaacagttattgatgttccagaaagaaatttaactcaagacagctttgcaaataaaccacaaaaagttaccatcaaaagagttatgcctgtctatacaagtctttcatatgatagagcagatagatactgggaagttattgtttctaatccagcttttaaaaaattagctaataatgaaagccaaattatgagtgcagttggtggctttgctattgatacttcaatcattaaaagaaatgttgttgcttcattactgccaaactatgttgatattagtgattttgaaaatttccatgataaagatggttggaactataaagttaataaaagacgtgcttttgatgattatatttctctgagatggtgtaatcaaaagcaaaacttttatcaaccacttgttatcagatataagaagaatggtacaaagaagccaattacacaaaatttatgcccttactgtccttatactaaaggtatggatttaaacactatctttcatagtgttgatgattcctcttacatgcatcatgtttgtaaagatcatggtgtttatactactggtaatgaaatgccaattccagttttcggtaaaactgcaaaaggtttagttgcagtttgtggaatctgtggtaatacatgtaatctctcagttgatgttcatgcagataatctgaacaattgtctgatttcttattttagacattgttttgataaacataagaataagagacaaaatagagatgccaatgaaattaagcgtgaagctcaagagattaaagctaatagacacaatttaattctggaaaatttaattgtctctaacatctaatatttaaactaacttataccctacattttatatttatttaccttttttattttgtatttcctgtttgtaatattaaaaaacaattaaaaaaatctatctcgtagtaataaacaaacattgattttttctagactcatagaatttatgtgatatatacctaaaaacttgattagtatcaagtacattaccatcatcagcagtatataattaataataataccgtctgacttgatactactaagttttccataattttttttactattgttacactttaatgattgtaaaataaataattataccgaattcattaatactaaacttattctctttatcatccattttcaaattataaagtgattcagtttatggttttttaatattactttgggcttatttttatttttaaaattaatattattttttcaatttttataaaaacaccatgattttttaaaaaaacaaaaatcacgtgaccacaaaatacggtaaccaagaataaccgtaaaatttatttttgctgtaaagtattaggaggatattgtagatagtgtacgtaaaatattacgtaatcaaataattaatacttatgttgaatcttttcaatacaataaagaataataactgtaactaattgtacttaatactactatgcgaatactgtcgatggaactggtatgcgagtagttagttaagataaagttagataataagttatccaaaacttgttctatctaaaaccaactctcatatattgagatgtcccgctcaagagagcttatacatgttatttatatactttaaagaactgtaattaattatctcacaagccagcccgattctccatgtggggaatctattattcagttcttagttgtaatataatgtgactaaatcaattagtggagaagttgtatataataaattaattaatgatcctatcccatcatttttcataaccgttgattttctgtcaacattggtttattaaattattcatcatatttcttcattaaatcttatttccattaatctctttgattatcattattattaaagtctatccttcagactataccacttgtaatgtctctattgattataatatagatattcactttatatcactaataagcttcatattacttacatcctcccgtctcgggaaacatcgtctcgatgttcactttgtgatataattgttgtaatttgataatattgattcaaaatttatttagtataatcaatttgtaatcagattaacactataatgtgtctttactgcaaaattcataaaaattcatacgatctgacacgtattgaatctcaaaatcatattgtattaattaaataagatcttggtaatatttccatgtaagagatataagagccgtaaattctcagtcatatatgaagtattatactttcttctaatttccttaaatcataaactctaactcctctactgtaataacatttgttaaattaatttaaactaaatcctaataaagtatattaattaataattggattttatgagtatatcttctttctagaagtaaatcagtaggtatcatttttaacaacatcaaagaataatattgatcgtaatttaacatacaataaattttcatatgtctctaattcagggattgaatggcaatttcttatcatgatcttcaactatttgccttttagcctttttatcagccttggtatggtggtatgtaccagataaatatagttgagtaagtctaaattcaaagttagatttgaattctcattgcagtgaattaaccaaagaggtaatcatatttgaggttagtaaaggttataatatacccttcatcgtgtctaaattgagttatacttacttcggaagatgcggatgcacgttgctctgcagttcctattgattcttctattgaaagtttatcacgataagtttttaaaacaatttccaaaagataaaaaatcttaagtctctctaatggtttcattttatttcacaaagcaatggaaaattataggatatcaacctgttaatgtatgccttagctttagctagtaaaaaaaaattataatttataatataagcatattaatcatgattcaagttattaaattagcataattattttaatttgcctctgaatataggattttaaccggttaagaattttcatttctgatcattaagtcttctgaccttttgatgattgttatcatgggaactatcttcttgataattttcagcagtatattcacgattgtgataataattattagaatttaaatgtggattttgtttgaaacgagattgtttgaagtttgaagttttttcaacacgctcagcggcttgtttaagttcatgataatttgagtatggtgcattttcaatttgttctctgatgtaagatggtaattttattaaatataaatccatgacaaagtctggttttaatggagtttctctgttcaacaacaatctttcaaattcagcattaaatttaggaacagtatcatcagaagaaaattgtaattgacatatagaataattattttgcctatttgcaattgaagtattacaatattctttattaaataatttttcaaattcgttccagtttaaactatcatcttcagaatctatacttgataaccataaatgagcagatcctttaaggcctattctcacatagtgaattcttaaatcagttggaattctattcatcatcataatttctttgaatgttgacaaccattcctgtgcagtttgtttaagttttgctgcatcaacgaactcatcacgttcatttggattaccatagaacttattaatatgattatatggaatcattttaacttctggaaaatctgagacaactggttcctcagacggttcaactgttggagtttcagtttgatgaatattttttctggctctaaccattgtacttgttaaattttttaataatattcttcaattgtattgacctaaaggtgctaccatgtaaagtattaggaggatattgtagatagtgtacgtaaaatattacgtaatcaaataattaatacttatgttgaatcttttcaatacaataaagaataataactgtaactaattgtacttaatactactatgcgaatactgtcgatggaactggtatgcgagtagttagttaagataaagttagataataagttatccaaaacttgttctatctaaaaccaactctcatatattgagatgtcccgctcaagagagcttatacatgttatttatatactttaaagaactgtaattaattatctcacaagccagcccgattctccatgtggggaatctattattcagttcttagttgtaatataatgtgactaaatcaattagtggagaagttgtatataataaattaattaatgatcctatcccatcatttttcataaccgttgattttctgtcaacattggtttattaaattattcatcatatttcttcattaaatcttatttccattaatctctttgattatcattattattaaagtctatccttcagactataccacttgtaatgtctctattgattataattttttttttttttttttttttttccagtcaacttctgtattactataaatttataaaagatactataaatatttttctctaaaataaatgctatataataaaacattcagtccggttaagggaaaggataatcctataaaacccttttgttatattgtaaaattaaatgaaaaatgaaaaagaacttaaagagtaaatgaactgataaagaaatgtaaataatggttaaattgtttataagttttgtgtgattattgtgaagtgttggaaaccaagaataagatggaagccttaccggtatttgaaatcccagtaagtatcttctataatattctcattttcccattgtaatatttcaggtctcttggcataagctaccctatgacaatagacaagaaatttaatgaaagtgtttataaatgtaaatgacgacgtttgtggtttttgcggacaaattaaaatagttgtggaaaattgtagagtatgttgttgatttgattggtttttgataaatttgaatatgtgggtggtgatgttgcattcattaataacatgtctaattggcgtcccgttgaatggaaggccacatagacagctactgtaaaatgtattgtttagtaatccggtgttaagtgcatataggtagtagtaatcttggggtttggtgaagatatgttgattgatgttgttaaagaagtttttccattcttggtcaccaagctgtgcattgttggcccaagttttagtattggtgttgatatagttgatgttttggtggagtttggaagatagatgattcaagtcctgataaagaatatttgaaggttgctgggatttatttttattcaaaaattgattctgcaatttggtttgtaggatattgttgtatgaggttatggtttgaggttggttgatggtgttgcaggtgatgtgatcagtcatttccgaatcttcagctggaagatttggtagtgtaactgtattcctccatgctgttaggtaggtttggagaggatggtagatgggtgtttcaggagatatatttactggtagaattatgtcactgctgagggaggtgtgagctggtggtgggtatggtcctagtgatggaggaatgatgttatgatcaaggtaccaggcttcttgttgatttcgttcatcaaaatgttgttgtctgtgttgctctctgaacatttccgagtatctgacggttatttttgatgggtggatggagatatgtgatgttgatggatgttttaactggttgttataatttgtggttagtaagtaccatggtgtaaaatgttgaagatgttgaagatattgggtgaaatgatgtgaggtttggatagtggttggatgttgttgatttagttgtattgcttcattaacttgagtttgaatggtgttaatggtattgttaatgtattgagagtataatagatttgattgaagattgattcggagaagttggggtaggtatggatgctttgcatccgactgggaaggatcgagcatgtatagtatgaaaaatgctcttcttccctgtagttgggtttcaagatccatcattccgaatcctccttgttttcttgggatgtaccaatagtctttgtttgtagggatttttggccatatttgatttctgactattgatttaacattgttgataaatgattgtaaggtgggtgcaggtataggatcatgttgatctaagaagtaaatggtggagaagatgtaagtgttaatcccaagtataattaggtgaagtggaaggtccatgaagcaaattcttcttaatcgagaggttagtaaatccagctttttataccagttggttttcatcaatggtactcctaggtaggtcggattttcggtgatggaagtcacctcaatatcatctgtgatttttgatttgatgtgttgaattgatgatgggttgcaatatagttttgttttttggtgattgagttttagaccacttatgttttcaaattcagagaaaatttggatggttttgttgatgtcgatggagtcttggttgaaagtgataatatcatcagcaaaagcctgactttttactttttttgtgaaattgctgagagtggttgatggggtgaatgtggttagagggttatagatgataccgttgatggtggagtttattttgtttaataggggttctaagcaaagattgaagatgaggggtgataatggtagtccttgtcgagttccattggatatatcaattttgggtcgatatatgaatttaccattgagaagttgggtgaaacctgctcgagattgaaacattattgctttaatgaacgttgatggaaaattaaatttcttaaggatggtggtgatgaagttgtggctaatggagtcaaatgcttttttgatatcaactagtaagagagaggcgtgtgatggtggggcagcattgatatagtttgctatgatctttgctgtttgtatgtggaggtggatatcccggtttggtaagaaagcttgttgatgtggtgatattaatctgttgaaaatgttcattgatcttctggtcaatgtatagttgtatagtctaaagatggtatttgttaaagagattggcctgaggttcccgggattgggttctttaggatcaaaatttttttttggtattagtttgataattgagttgaagattgatgattgagagttgacggtttgagatgcttggctggttgagaagtgtatttgattaatgaactgaatgatatgaagttttgaatattcccagctgtggaaccaggcagcatatgtgatgccgtctggtccaggtgatgaagggcctttttgatgtagtgctttaaggttgttaaagatttctgtttcttcaaatttggcattaagattttgtatttctgaatctaatagctgtggggctatgaagttggagaaaatggagttgaatagaatttctgtatctgtgagggaggtaatggagttgttgttgaatagagaatcaaaaagtttgtgtgacttttccattgtaagtttggaaaaggttgtttcatttaagaaatttttgaatcgtttgttaagttgttggtaggtgatgcataatggattagagttgtgtgatgctttcaaatttgagtacagattttctcgggttgattggtgctctgatggaagaagtctggagagtcttttgactttcgaaaggcggtgttgtatacatctgatgtagtggtccatgctgagaataaggttatcttcccatattggtgtaggttggaatatgaacttgattaaatcagggtgtttggtaaggtgatgtgggaatggagattttctatttgaatatagcgatgttgggaatgaaggagagtgttgatttgaagaatgctttttccttcgagattttggtctgatggtaagcattatcggaagatgggttgagtatggttgtttttgaagtagtttgtatttgatggagtggtgatggagtaagttttcatgaatgtaaaaacgatcaagtcttctattttcgcctgtggaaaagttggtggggaggtattggtattttgttggagtccttgatgttgcgtcaatgcagtcaaggtctcccatggtatggttgaatgtgtggtttggaggagtgttccaatctccaaggaagattggattggtgaggttgattgacttgatgttggtgttgaagtggtaatagaaatcttctttggttattgtggtgaggttggaaaagctgctggtgtgtgatgaagcgggcgcatatgcaaggcagatatgtatttcagtatcatcaaaggtcagtttgagatcggttatgtatcgattgtgagggcgttggaatgatttttgtatgatggaagtatcaattatttgattatatgttgtgtgattgacaaatatttgcactctggattcttcaatggtatttactggtctgaaatttttattttcaaacatttttagaatttgctctttagtggtggattctgttgtgatgtcatattcagtgagtgctatgatgtcggggttgatggtgttgatttgatttagaaaggtggccgacttggatattgatttaagtttttgtatgttaaataatattaatttaaccatttattatttaatttttgattttttaatatgtaagaaagaaacattggagttgaattgaaaatgaaatctgatttgaaatttgttatgaagtaagaaaaagaacgttctatcatgatagatagatatatattggtttttaccagggtaattaaaattgttccggaggtgagtgttcatcaaccagtgatgccttaaggcgtttatcagatggttgttgaacatatttgtaagcttcgggatccattgattggtcctcagtttgatcgtttagcgattgtgaattataagcattattttgagtgtttagtgatggttgatcataattagcattttgattgtcaaatgattgttcgttataattattgatttgagtgccgattggttgttggctatcgttatcgatagtgtttggagtgtttccactgatttcatctgctttgagttgttctaatgctgtttggaaaaattcttgaagggtagcagggaagaaattgttataaatttcgatccattgtggagtagattcagctattttagcgtttttgaaggcatccctcacgtattgttcaggaagtagactaagtccttgtttgatgatttcttgtgaagctgtaggacagctgattagtttatgttcttggtgacaatgagaacattctttttttctaattggacattgttttttgtggtgaccgagaaccttgcagtaagagcagaaacgtaggggggaattgacggtggtagtgatgttatattgttcgtcatctagtgtgacttcacaagtggttggagggactgagtggtgttttaaatcaatgaggacatatgcggatttaattgtggaggttttaaatgctatgtttattggccttttaggcggtttggaaatgtggataatatttccaaagtttgagtaaagttgttgtgctagaggttctgcaagagagtctctaatataagaagggtagctcatttttaaaatgacagcgttttccaatgtattttctggtggagaagagatgtaaatttcgtctgacttttcagcgacttggtgaaatgtagcaatgagtttttggtataataagtcgtcacatagtgctagtgatggtaggagtaggtggaggaaagtgaagttagtcttgatatcctcaaagcaagtttcacaatctgatgcaatatcagaaagatctttgtctttatttaattcatcaaaaatttggtttaaaaaagtgctgattgatttttccgtgaggtttctggagttggatgtaatcttgaatgttgtgtcatactttaggacattagggtactctgttttgttggagagcatttcttcaagttctggagggttgttaaaagcgattttgttggatgcagagacgcgacgatttgtaggatgaaaattttttggacgttttgttgttgtgttttgtatgtacgaactagttgggcgtaagttggattagcttcattaatgtggtttgtatgagcagtttgagagttgttagaggagttaggaatagctgggtaagtgttattgtttgttagattgttttgtttatatcactaataagcttcatattacttacatttgcgtaaaagcctggctagctcaatcggtagagcgtttgactcttaagtattgatatttaattaatagcaatcaaaaggctgcgggttcgagccccgcgttgggctttacttttttgaaatttttttttgtatttacagtgatagcaagttactaatatgctttcagtttttacacaattttattacttagtactatttagtattatttagtgttatttagcagtttttttgaaaatcaattgataaacttttaatttgtcattaagtggatgttttcttgttcaaattataactgtccacagatgattcaaattcctccgtagcttcaggttgtttttcaagatcaaccttttcatcaatcttttcatcaccaatttctttttcttccctttctggttgaattgatttagttgtatccttaatagcaaaaaccattaataaaacaacaaatgcatgaaatccaatcataacataaagaacagctctaaattttttttgaatataggttttttcttcaaacgtatatgctttctctaaattacctgtgatggaaggaactaatgcattaccaacacttaataaaacttgactactagtttggaaaataccattaacaacaccttgtaaatgaagtggagtactttgaacaaccaatggcatataaatattaaaaaaaatattaatactataaccgaacatgaaatatggaatgaagttgtatttccaatatgaattaacggtatcaaatttagtacgagagaaccaaataatactagctaatgaaagaaccgatgaaattatgaacatatttttgtaaccaactttcttataataagaatcccgataaataaaagcaccaaatactaaaccaatagacaatgggaaagccttaacagctgcaacaattggaggttcatgatcaataagtgtaaaagtttgaacaccaatagcagtaagcataatggttgttgcaaaatatgtaccacgaatagttaagaatgaataaacatttggaattttggaaatttcaggtgggaatagtaaatcaacttgaagtctccagtttgttgatttatcctcattgtcatgtttaatttgatattttttaatataaaaatattcataagctaaggcagagaggaatgtgaaaaatcctacaattaatggcgcaattgcttttggagatttccaattatcaccaccttcagtcaatcctaaaatcattaacaaacaaccagcaataactaagaaagcagcaacaaaatcaatatttttcatttttaacttattatggctttcagttcttttaattggaataattaaaaagataagtgcaatatgacaaactaaagaatatgcaaagacaaaataaaagaaacctttataaccaattttactctctgagaatgcaccacctaaaacaacacctaaacctattgtagcagtcaatgcaagaattgaacaaacaatcataccgttcaaatatttagctaaaggaccactaaagtagtttgctgccattgcaatagttgaaggaattaaagatgatgcaccaataccttgaatagctctaaagacaataagtgcaacaattgaggtatctggaataagagcacatattaatgcggaaacccaaaagacacctaatcctattaaaaaaagattatgagagccaataatatcagaaatcttacctgaaatcataatgaatgaacctaatgttagtgcgtaacctgataacacccaagttgcagttgatgaatcagtgttgaacctcttttgaatatcagcagctaacgtcaatgaagatgatgaatttaaattatccaatgctgaagcagataaaattataccaaagacaacaaaaacatttcttttctcttccggaacgactgttcttgcccatgtaaatgctttaacaattggatcaaaaatcatttgtatttgtagttacttgatttgttttacaaaaagaaagatagtaaaataaataaattagaagtttatacctttctgctacattctattaacggattaactttgaagaaacagttttccatttatatacccatctgataccacatcattaactgccagacggaaagagagcagatcatccgaaaatagatttgtaattttcctaattgggatacaaaaattttcattattatttgtcatctacatgtttttaaacaataggcggaagctgctacttcctgtataaaaaacctttggtattgtacgactttgttttgtattacgtaaacatatatatattgccaagtcagatacttggtaattactaggaatttctttgcaagactactactaaacagtaagactaatttggaaatatgtttattaatatatgatttgcgctaaaatatagaatacgcatatcaaaagtcaaaaattaaaagttagaaattattatacagttgtatttttattagcaataatagagctctcaattgatgattctgaattaatttgaatttcttcctgtttttccaaatcgttatcattattaatctcatcattctcatcaactgtttcatcaactttttcttctgattcttcaggcgtgtctttagatgtatctttaatgacaaaaaccatcaataaaacaacaaaggcatgaaatccaatcataacataaagaacggttctaaacttcttttgaatataagatttttcctcaaatgtattagcaatagttaaattacctgtaattgaaggaaccaacgcattaccaacacttaataaaacttgaccacctgtttgaaatataccattaacaacaccctgtaaatgaagtggagtacattgaacaaccaatggcatataaatattaaaatacatattaacaccataaccatacataaaatatggaatgaagttgtatttccaatatgagttgacggtatcaaatttagtacgagagaaccaaataatactagctaatgaaagaaccgatgaaattatgaacatatttttgtaaccaactttcttataataagaatcccgataaataaatgcaccaaatactaaaccaatagacaaagggaaagccttaacagctgcaacaattggaggttcatgatcaataagtgtaaatgtttgaacaccaatagcagtaatcatagcagttgttgcataatatgtaccacaaataattaggaatggaaaaaaatttggaattttcagaatttcaggtggaaatagtaaatcaacttgaagtttccaattataggacctatctttgtcatcatgtttcttttgatattccttaatgtataatgattcatatagtagagcagatgtaaaggcaaaaaaaccaacaataaaaggtgcaattgcttttggagatttccaattatcaccaccttcagtcaatcctaaaatcatcaataaacaaccagctataactaagaaagcagcaacaaaatcaatattcttcatttttaacttattatgaccttcagtttttttgataggaataattaaaaagatgagtgcaatatgacaaataaatgcataagcaaagacaaaataaaagaaacctttataaccaatgttagtttctgaaaatgcaccaccaaaaacaacacccaaacctaatgtagcagtcattacaagaatcaaaccaacaatcatagaatttaaatacttaaccaatgaacccgtaaaataatttgctgctaaagcgatagttgatggaatcaatgatgatgcaccaataccttgaatagctctgaatacgataagtgcaacaattgaagtatgtggaatagtagcacaaataagtgctgaaacccagaagacacccaatccaattaaataaagattatgaggtccaataatatcagaaattttacctgaaatcataatgaatgaacctaatgtaagtgcataacctgataacacccaagttgcagttgatgaatcagtgttaaaacgtttttggatatcagcagccattgttaaagaggatgatgaatttaaattatctaatgctgtagcacatagaatcaaaccaaacacaacaaagacattccttttctcttccggaactacagttcttgcccatgtaaatgctttaacaattggatcaaaaatcatttgtatttgtgattacttgttttctttttacaaaaagagaaagagaaaattagaagtaagtttccctctactacattccatactttagaggagtagcctttaatttatactaacttgatccaacaccatcaagagcacacataaagagagagcatttgtaatctatttcccaaaagggagcaaattccgttaatattagatatatatttgtaatctatttctcaattgggaaacaaagttttttcaattttcatgttgggagccaaaaaatttgtcagggcgtatatacgacactgctgacgtatagtccatatctcaggttagggaattgccatgagcaaggtattggacgtcgagtgttgttgactacaaccgacacacatttatactatactgtttatagatccttatataacagaagtaatacacttatccctcacctaagctatagaacgagtcacaaatatattatattccgaaacaatagtgttaatcttcaatgttttcttatggcaggggggcagagtcagtagatttttgtattacgaacaatagaatgctgataattgtgtgttattattatccatagtttctaaacaattgttggaacgtatattatttcctgtataaaaaacctttggtattgtatgactttgttttgtattacgtaaacgtatatattgccaagtcagatacttaggtaaatactataggaatttctaacaagactactaccaaacagtaagactaatttggaaatatgtttactaatataagctttatgttaaaatataaaatacaaaaattagaaattagaaattaagaattatgatacagttgtatctttattagcaatgatagagctctcaattgatgattctgaattaatttgaacttcttcttgtttttccaaatcgttatcattatcattatcattgttattattaattcttggattatcatcaactgtttcatcaactttttcttctgatacttcagatgtatttttagttgtatctttaatagcaaaaaccattaataatacaacaaaggcatgaaatccaataataacatagaacacagttctgaatttattttgaatagctaatttttcttcaaatgtattagcaatcgttaaattacctgtgattgagggaactaatgcatttccaacactcaataaaagttgactaccagtttggaaaataccattaacaaggccttgtaaatgaagtggtgtacttgaaatgatacaaggaaagtagatattaaagtaaatgttaataccatagccatagagaaacaatggaatacaatcatatttccaatatgaattaacagtaccaaattttgtacgtgaaaaccaaataactgtacctaaagaaataacggatgataaaatgaacatttttttatatccaacttttctgtagtatgaatcacgatatagaaaggcaccaacaactaaaccaactgagataggaaaagttttgagagctgcaatgataggcggttcatgataaatcaatgtgtaggtttgaacaccaatagagatttgcataacaaatgttgcatagtaaataccacagataataaggaaagggtagaagtttggaattttcaatagttcaggtggaaacaataaatcaatttggagtttccagttggaagacttgttctcattttcatgtttcctttggtattttttaatgtataatgattcatataataaagctgacatgaatgtgaaaaacccaacaattaatggtgcaattgctttaggagacttccaattatcaccaccctcaattaaacctaaaatcatcaatagacaaccagcaataactaagaaagcagcaacaaaatcaatatttttcattttcaatttatgatgaccatctgttttcttaattggaataattaaaaagatgagtgcaatatgacaaataaatgcataagcaaagacaaaataaaagaaacctttatatccaatgttagtttctgaaaaagcaccacccaagataccacctaatcctaatgtagcagttaaacaaagaattgtatagacaatcataccattcaaatgtttagctaaaggaccactaaagtaatttgctgccattgcaatagttgatggtatcaaagatgatgcaccaataccttgaatagctctgaagacaatcaaaggaacaatagaatcatatgggataactgcacaaataagtgaagccacccaaaagattcccacaccaattaaatacaaattatgaggaccaataacatctgaaattttaccagaaatcataatgaatgaacctaaagtaattgcataaccggataaaacccaacttgcagttgctgtatcaacattaaatttttcttgaatattggctgctaatgttaatgcagataatgaacttaaattatctaatgatgtaccacatagaataagtgtatatacaaaaaagacgtttcttttctcttcagggacaacagttcttgcccatgtaaatgctttaacaattggatcaaaaatcattgtatattgaattacggtatgctatctcaagaagtaaataaaattatactatagacttaaaagtataaaaaggtatacttactttcttttatactaagtgatttgaagacaaaaaaaccacacaatttagatgattaataatctcatatataagaaagacccttttgagaaatagatctgctcccattgttcggaaatcggaaatattttttaactccctcgtatttatacaaccttatttccgttctccgcccattttcttaatctccatttttacttgtttaggcagttttcttatcttttactgtatcttgctaagtacaatactagttaaataggttattgtttatgtattaaattataaaaatatgttaaagaattacctatatatacgataacaaaaagcaaatgtttttttttgaatttgaatattcttagactttatgtgcatgagggagttcaacttcatcagcacttgaatcagtgagaacttcttcgtcagccaatttacttcttggaacatgataatgtctatacttgtatgtgaaaaagaaaataactgataaaatccaaaaaccaccattaatgacaatagcataattcattgtagttttatcaacaactttagatgctggaaaataaactaaaatcatgataaatgcccccagtaataaagctgcaccagaagctaataaaattgctcttaatggaactttcattttttgattaacaattttaaaaaatcttgacattggtaaaccgtcatctcttgcaaaagcccaaatttgtcttgaagcagcagtaaccaaagaacatcccataagccattgacaagatgccattaatgacatgaatgcaactgcccagtttttacctaatgaatcataaataacttgtgccattggaaaccccgtatcagtttctaaaacacttgcaatatcaggattcatacatgcagttgtacaaattaagataaagaaacctaaaaacctacaaaatgtaattgagccacaaataccaattggaacaccataggaagcatttttagcttcctctgacatatgaacacatgaatcaaaaccaccgattgtccaaacagctgccataaatgatagacagaattgccaaccttttggccaatctgagaaattatcaacttgaccaaaaatgaaagcaccattattaaattcacctctattaattttagttccaattggtagtgcaataaagtataaaattaaaagtcctgtatgacaaacagatgaaacagtctgtaataaggcaacattttttgaagataaacatgaagcaagtgtaccagatactacacaagctgcaaaaactccataagttttaccattagttatttcaaagttaccatcatgagataaataaacagcagctaaaatttcttctgcattaccatagaaaactgaaacacaaccagaacaaagagctaaagaatttgaaataccaacaataaaagataatggaactttccatgcatctggtgcataaaagaaagtccaataatataaaccaccagaagttggaattgcacttgctaattctgacattgcaataccaacaattaaaataaaacaagaagcaattgcccaagaccaaattgcacccgaaggaccagctgcaagtgcagcacctaaaagagatgaaagtgaaggtaaaatacccataattgaataagcaataccaaaaatttggaaagttgaaaatcttctctttaattcttgtttataaccaatttcagcaagtaaatcatcatcatttgcagctgcttgtgggtcaatttctctaatatttgaagcacctgaagtaattacatgaattcttgtttgagttgatgttataggtgaaaaacctgtagataactttgatgtcattgttatgggagggtttctattgtgaatggagattaagaaaataaattacagaactataaacgaaggattcatgttggttatatatagattttaccgatatcagtagataagaatgtttacattataaattacaggttattgataagataattattgtaaccttaaatttaagtaatttatgaaaacttagatgtaataatatattaggctaatacagacataacttccagatgtcataaactttaatcaataagtagatggtaataaaattcaacaatatagatagaataagttgatataataggcttaacagctacacttgcctattttggttgttttatctttaaatattgaaataagagacgccttagatacttaaataagcaaatttaacgataagtggtcgagattgcaagaaatgccgtgttttagataagagatttaaagatttaacgggtgtcagggcgtacatacgacactgccgacgtatagtccatatctcaggttagggaattgccatgagcgaggtattggacgtcgagcgttgttgactacaactgacacacatttatactatactatttattatagatccttatataacagaagcaatacacttatccctcacctaagctatagaacgactcacaacgggtataagataagaagagggattacgtaatattttattttttaatttttcatttttcacagtggcgaaattttaattaattgtattaagggtttttctactatggtacatgtgttctttttttattgtttgatttggggtttgtgttagggaaggctgatgtaggtatatgccattggtatgtacattgtcattatagagtatactatgtagtactttattaattattattattgacttttcacattaaaaatcttctctttgtcaattagagtgaattttcactgaaaattaactttattcattcaattgtgtatcttttttcttgagactttacccattaattactaacatatttagaaacaggatatcaaatttacagatattgaatatgtgtttctatagagttacacacgtttcaatatcgtcaaaaaagtggcaaaatcgatttactacatgaaaattgaaaaattttacgtctcattacgtaactcaaatatttttttgggaaatcaacaattacctaattaggaaaaataatcaaatagggcataatttaatatcataataagtaaagaaagatgactttgaatgaaggaattgcccatttagttgaatggggaagagaggaatattcttttttattggctttttgttagtatttagaagattccccttttctgattgttttactttcacttattctatcccctttctttcatttctttactgttttgtgtcctattttgtttcatttgatttatttcatttactgccacaaagtaacgtcgcatataccccggtttattatttactggacccccatatattttaattagaaagtttcctaactattagaaagtttccaaaacctatatttgattgaatcttataaattaaattattagtaagtataccattaaagtttaaaaacttaattcaatttcctgataactgaaacattttactaactgttagaacattacattattttctagtttactgaattattcagaatgcatttatcatctgataaatttaaggttgataaccaaccatcattaattgatgttgcatcaaccgctttagttcttcaaggaactgctcaatttattgatgctcttaaatctgattttgccaattttaaagaatctgatacttttagaaaagcagaaattaatcttaaaggacaagccttcttaatgtaccaatggtcattaactagatattgtgtcgaaaatccattaagaatgaaatatattagaaatgatgcttttgatattactgttgataattttgttattgaaaaggaagaaattcaaaaatatattgcaaatccaaaattcttatggagattctctgttagaaattatcaatttttcgttacctttttcaagtctagtaagaaatcgacttttttctttagtaaatttgaaactgctgatattgatgatagtccattggtcgactatattaaaccaattaaaaattatgttaaggataaattcaagaaatcagtaaatcttacaattacttcaactagaaaaccttattattttgatatcagtttgatcactgatttcatgaaaaagcattttgaacctattaatgaattcaaaacttcagaatttttattttctgatgattattatttacatgaagttcaacctgatgcaacttatgaggattttgtttgtcacctcttatgtggtcaaacaaaaaattttatttctccattattattatggcacaatgaaaataaaggtacttcaactagtcttagatcaactaattctaaatatgcaaagagagatactattatgaatttcaaaactgctgctttgaaaaataagatcttttcaagtttaaaaaatgatgttgatttaagtgtttatgatgctgataccacatttagatcaattaaaactgttaatgcacgtattattcctcaatcacctgcttcatttaaagcagaatcaaagactttcttagctgtcaacaagaatgtctcccctgtcaaaaaatcaattaaaacttttgaaattgtcaattcacaagttattaattcaaaacctgttaattccaaatctgttaattccaaatctgttaattccaaatctgttaattccaactctgttaattcaagtatctatgatactcctactaaaccattatggtctagtaatgttaatactgataatcattcaacaccaattaaatcatcattaaatttcaacgatgatgattcaatgttaacattatcacctacaaaaccattagttttcaaaaatggaactaatttatctacaccatcaccaactaaacctttagtgtttaaaaataattccaatttatcatccccatcaccaaccaaacctttacgcttaggcggtaatccatcatttcaatctacaccaactaaaccactcaattacccatcatcaccaacatcaattagaaattcaccaaaagttttaaagaagggtaaggtgattaaaaaggatgaagttgttgttaagacgccagagcatttattacatgcttatgaatttattttccctaataagggacaaaatccaactttaagacttgaatgtatcaaagaaattttagaacataagagaaaaagttgtgctacaactcatagactttatcatactgattggcttcatgaatatcttatgagtattgatacagttgaaagtcaattttacaaatttgcattgaaaacttttggttctaaatgccatgttaattattttagatttgatgatatttatggtgtctcagttagaactggttggtcaattccatgtccaacaaaggtaaaagttcaaatggctcaaaactttgtttatagtctttatcatgatactgatgaatcaataatgagattacaaaaatcttatgaaaataataaagctggatatcaattacattataatccaacaattaccattaataaatcattaaaagttaataatcttagatatgatagatcatttgctgttaaaattaataataagggatttaatttttcagcattttttgatccaaaacaattaaattataattataaatcaactaataatacaattgaatctttattatcaaatgaatcaaactttaaattatatcatattaataaatttagagaatttcaaaaaaattgtgttttaggtaaagattatactggattcaatgatattatcaattcattaacaacttcaattttagatggcgctgaatcttttgatgaattaaagaaagaagctaataatggtgttggtgatactgttaatgatattgttaatgatacagttgataatactgttaatgatactgttaatgatattgttaatgatacagttgataatactgaagttactaatactgatgtttgtaataatgaaattactaatactgaagttgctaataatgaaattactaatactgaagttactaataccgatgttggtaataatgaaatcaatgatactgaagttactagtattgatgttgataataatgaagttgctgaagttgctgaagttgttgaagttgctaaagttgctaaagttgctaatgaagttatatcatctgaatctgataatgattttaatgttcaatcaagtcctgaacctgatactaatgcatttgttgttcaatcaagtttatctgatcttgaacctgatatcgaatcagctaatgttgttgttcaacctaagattgattatgaaattagtatttcaaatgaagatgataaagaagaagctgaagaagaatatgatgatgatgatgatgaagctgaaaatgaaaataaagttattaatgatgaagttgaaattaaacaatctgatcaaatagttgttgcacatattcctaaacctgctggcgggttaaagaaagattcaacaattaggaaaaatgtatcagttaatttctctaaatctaatgagctttatgaaatttcatatgaagttgttgatgaagatgaagatgacgatgaatcagatgaagatgaatcagaagaagatagttatgaagatgatactgaagaaagtgaaattgaaataaagaaaataactaagcaaaatactaaattaaatggggtttctgaatatagaaacaataataataacaagaacaataattttaatgattacaatgatgcatataaggacaatttaattcaaaccaatgattctattaaattatttgctccaagagaatcaattaataaaaaagacccaattaaaattgatgataataataataagaatattaataataatagtaatgattttgaaaatatgaatatcaattccaatgtaggttgccaaaattccaattctcctccaattacaattccaaataaatctcataataaaaatgtcaaaaatttctttagtaagttttccaagaataagaacattaaaaaacttactaagaataaatatattcaaaaatatgagaagaatattagtacaatttattcaactactaaagattacattgatgaagttaaatccacatatcaaactaattccaaatacgacatcaatgatactttactagatgaaagaattttacgtgaaatggatgaatgttgtaaatttagagaataaattatatttttagaatataatagattagagtgagagattgatgagaccttaaaaaaatggaagaagtatgaatatttttcaaaatacattattattattattaatattaatattaatattattattagtttcaattggtttttttttattaattgattttttttggcataaatgattaaatagaatttattgaatgtagacaatatatttcacataatatattgaaataggattccccaagtaatagtagtaataataaattagttaatttcaattaattcatttcacatttcaattcagtttatcaatatttttaaatattttcaattgattagatttcattcaagagatggtaagagggtaaggtaagtagtagcaactgaggtagtatagttgatgtattttaattgattttaagttataattataagaataaaaaaaaaaataaaaaagaaaaaaaaaaatagaaaagtataaaaaatagaaaaaaaaaagaaaccaaaaagtcattgcttaatgaaaagatggatagtgaaaggaagatagtgaaaggtgatactgaaaaagacaatgtaatggtaagtgataaatgattaacaaataatggtgaatgattaacagattactgattaacggatggaagattaacaaatgaaagaataacagagaaaatagatttaacaggtctaagaattaataaaataaaataaaattaaaacagaacaacaagacttttttgacggggggttgaagttgttctactattcccattgagagtgcttagacccagtatttgacagatgctgggagctacggtgggaatctattgcttatatagtttgtgtaatttgtatttaaagattaaaaaagatgaaaatcaaagatagccatgtagattcttacgtaatgcgctggaaattgtcgaatttttggtgatggcaaagttttgatgtttattataggtgttttcttttgcatttggtgttggatttctgtaagtgtagagcagtataggatgtctggagaccagttggtgggaatggcaagtacagagaatatagggacacaagttacgttgtttccagtggatccattacctactagtaagcaagaaactaattttattgaaaataataaagtactgaagaatgaacatcaatttacgtatgtaaatatcaatggattgaataatcaaggtgtaaaacaattggagagaatcaagatgacatttgagagtgatttattggatgaaattaagtatattttaaaccttttaattgttttatcaaataataatccttccaaaattgatttaaagaatgaatattcatttctgattgattatcttttaaaatatttagaaagatcatcaattgaattagatattaagattgattgtcttttaattattagaaatttaattcaaaatgttgataattgtcaagttttaagtggtaataaaaaattaagagaaattatattaaattttttaaatatttatgataattctattgaatatttgaatttctttgaaaatgatcaatataaggaattaattaaatattcattagatacaattgaaaatatttcatcatatttaagtccaattagtgcagatgatttaatttttaataaattaattcatattttcaaagtaaacaatgataaaaataattcaattactattttaagatctataagtagatatctctatggtacatcatccaataatacatttgagaataataataactctaataataataacaataacaataacaataataataccaatacggatgcatcagttttaattgatgatgaatttttaaataaaacattaggatttttacttttattaagtaataataattcaattgatgatgaaattattttaacatcattagattttttaattcaatatttatcgattaaagaggaaaatttaaataaattaatcaatgatgatttaaatagaaaattaattttagagaaacttttaccattattaatgatttataaacaaaattacaaaactgaattcaatagtcaaaatttgaattatcttagattatacaaaagaattgagaaaacacccaatttcaatactaaaatacctataataggggaggaaaattcattaatgaaggaattaaatttacttaatgaaccacagagagcaactgcatggttaagatgttgctttaaacctaataaattagccaatataacacaaattgaactttggagagcgtatgagagtcaatttagtaaaattaaattattaccagcagttgaatttattaaaaatgttcaatttgcattcccacaaagtaaggctaaagttattcaattaccaaataatgaaggtagaaaatttataattgaaggaattgaaccaagattagaaattttagatattgaaaagggtaaaaatgaagcattagttaattataattataatgataatacattaaccaataattcatctaaatattataaaccagaattaaaggagagtgaacaagtggagattgagaagtttaattatggatttaatgattatcttaaattaaatgatatcaatataagtacatgtcaattaatcaaggaaattttaaattatccaataggtgttgaattattaaagaatcataaatctgaatttgtgcaaaacttcatctatgttcctgacttactcaactacatctacaatgatatcattgatgttttataagtgtttaagtattgtaaatatattgtaaattgtataattataagaaacttattgtattgtattgtattatgtaatttgtgattttctatttccattttctagtgggtgactattatattaaactgtggtgtttatctaagttctttcctatagagtacacatcagagtaacagtagagtataggatgtcattctcattacctgcatctttggctaagattagagtttcacgtatacatcatacatgggccaatactttccaatgttcaccacaattttatttccaaccaaaaacaattgatgatatttatgaaattgtcaacaatgcacgtaaatttaataagaaattaatggttgttggatcaggtcattccccatctgatttaactataacttctaatccaattaatgaatggttagttaatttagataaatataataaattaattaatgttaaaccatcattggatggtaaatttactgatgttacagctcaatcaggtatgagagtttatgaattaaatgatattttgaaaaataaaggtttagcattacaaagtttaggttcaattagtgaacaatcattagcaggtataatttcaacaggtactcatggttcatcacaatatcatggattagtttcaaatcaaattgttaatttaaaattaattaatggtatgggagaattaattaattgtaatgaatttgaaaatgttgaaattttcaaagctgcatgtttatcattaggtaaaattggtattattgttgaagttacatttagagctgttcctaaatttcaaattaaatcagttcaagaagttattaatattgaaacattaattgaaaaatttgattcaatttggacatctgatgaatttattagagtttggtggttcccatatacgaagaaatgtattctttggagagcaagtaaaagtgatgaaccaattagtgaaccaagaaaatcttggtatggtacatttttcggtagattattttatgaatcattattatatatttgtgttaaatttttaccaaaattaacaccaattgttgaaaaatttgttttcagtagacaatatggattaattgaaacatttaataaaaatggtgatattgcagttcaaaattctgttgatggtttaaatatggattgtttatttcatcaatatgttgatgaatgggcatgtccattagttagtggacctgaaattattagattattatcaaaatcaattgaagaaggtaaagagagtaataaatttttcgttcattcaccaattgaaattcgttgttcaaatactacattaccaaattatgaaaatggtgttaaacaagatttatcgaaaagagaattaattaataaaggtccaatttatggtaataccgttagaccatatttagatacaacacctaaattaaattatgttccattggataaaattacaaatagtcaattaactctttatatcaatgcaactatttatagaccatttgattataatactgattataaagaatggtttcatatatttgaagaaattatggaagcagcagatggtaaacctcattgggctaagaattatgataattccatagttactaaggagaagatgatggaatggtatggtgatgatttaattaaatggagagaagttagatcaaagatggatccaaatggtgttttcctttctggtaaggaatggttaattagaaatggtattgttgaagaagatgttttaagtggtaaagaagttaaggagagtaagtctagtgataactctgttgaataagttgtttggaattaatttacagttactgtatatagtatttataagatagatatagatatagatatagatatagatatagatatagatatagatatagatatagaccatttagacctttaatactgtacaacgcgtatgacatgtttttacatgttttgtttcatgtagttcttttctctgtttttggtatttacaccgtgtttatcagaggtattggagtaatagaggagtagaatgtcatctccatttgccattttggatcgtcagaagaaaaagaacggttcaaatgctattttcccctctcaaccgtcaaataatcaacaattgaaaagatcatcatctgcattatcagcatcatcttcagcatttgccaatgttgtcacatataaaccatcaagagagagttccaaagatactgaaaagccaaccgaaaatactagggaacgaactacagaaagaaaacctgtaagatcatcattaagttcagttttaaaggcccaatctaaattttctggtaaatcatcagttgtatcatctaaatcaatatcatccattgctaaaaagccaggtttaaagagaaataacagcgcaagtgctgcaattacttcaaatcatttacagagatcattaccctgggcttcatcatcagtatcatcatcatttaatattcgttcaaatagtaatagaaaattaaacaattgtgttattgataataacgtgtcatttaggaaagaattatcaccaagtagcagtaataataataacaatagcaatgggttaagtagtatagatacatcaattgatggagttgaattaagtgatgaacaaattaaagtattggatattatattgaataaacgtaaaaatattttctttacaggatctgcaggtactggtaaatcattccttttaaaattaatcataaagaaattacagacaaggtatggtattactaatattggtgtatctgctccaactgcattagctgcaagtaatattggaggtaaaacaattcatagacttttcggtattggattaggtaaagaaagtaaagaaatattattggagagagttaaaaagaaaatggataattatatggtttggagaagaatgacagttttaattattgatgaaattagtatgcttgatagtgaaatgcttgaaaaattaaattttattgctaaaaagattaaaagaagtgaaaaggcatttggtggaattcaaattataatttgtggagattttttacaattaccaccagttaataaaaataattttaattcaattaatttaaattattgttttaaatcaaatgcatggaaagaaattgttgatgaaaatataattttaacaaaagttttcagacaacaaggtgataatgaattaattgatattcttaattctttaagaattggtaaaattgattataaaattgaaaataaattattaaaattaagtagatcaattgaatttaatgatggtattgaaccaactgaattatttccaactagaaatgaagttgaaaaatcaaatcttttaaaattaaatttattaaatggacctgaaattgaatttattgctaaagatatttcaattgataattctaaaattgatgaaaaggataaaaaatcattggaaaatttattatgttctgaaattttaaaattaaaaattggtgctcaagttatgatgttaaagaatgatgttcataatgatttagttaatggacaattaggtataattgaaacttttttaacaaaacccgttttacaaagttttaatgctagatttggaactgattatataccttataaattagaaattttgaaaaaaattggattaatgattttaaagaggaaagagttaataaatgatgaaggtattgataatttagattatttggataatttaacagttgaaattataatggaaataatgaaaagttttgaatcaaaggatgaattattaccatttgttaaatttacactaccaaatgatcaaagagatattagaattttaattgaaagatctgattttataccaccagaatacattaatatgtacaatgccccattaacacgtagacaattaccaattaatttatcatgggcaatgtcaattcataaaagtcaaggtcaaacattacaaagagttaaagttgatttacgtaaaattttcgaaaaaggtcaactttatgttgcaattagtagatgtgtatcatctaaaggtttacaagttattaatttcgataggaggaaagtatttgttgatgaagaagttatttctttctataattcaatttctaaataaaaagttaaatagtatataagattaagataccgtatatagagaacaaataatttttcaaaatatgttcatgtaacgacacgttatttctttctttctagggaaggtaatacgtgtatttgatgtggattatagagtatggtgtcaatagtaaggaaggtagcacaggtaatacgagggctattgttttaaaacctgatagagcttacacattgggtagatcaccagaatgtgatatttcagttgatataatgaaagtatcacgaaaccaatgtattttccaaacttcaactattgatgacagtctaagtttcctgaataagggacatgctagatggattgatagtttaggtaatgaaatcaatggtagtcataaagaatatttgaaaattgatacaaatgtatcttataaacttcgatcaattaattgggaattcaaattgattaaaattagtaaagttaatagttttaaaataagtggtgatattgagaagttaattaatggagttattgatgtggaaatggatacaggaatacctaatggtatggttatgattaatggtgaaaatatgaagattaaggatgtacaaggatggataggtaaattacgagatagacaatgggatattattggtgattttaaagggtatgaaaaggagaatagtatcaatttagatacagatagtgatagtgatgtagatatgggggaaatagagagtatacttgaacctgaagtggaaaagaaacacgttaataagagtataatggttgatgttaagccatttactgatataattgataataatatcaatactcaactatatgaatcaaataatagatcaacaaaacgttcacagaagagtcaaatggagaaatttttagatgattgggatgaaatggatgatttagattcatataaaagtagtaatgaaaaaattaatgataagatcaatgaaaagatcaatgaaaagagtattgaggaaaagattatagttaataaaccaataatacctttaaaacgtggcattattgaaaaagatacagtgaagaagaagattcattcaagtgttaaaaataacgataatttaaccaatatgtttaaacaaactaaaattattaaaatggcaaatgaagagaaattaatgaattcattagagaaaccattaagtaatgaattgataaagattaaaaaatttcaagttaatataggaaataataataataccagtaataatccaaggatatattccaattatcaaatgttatatggatccaataatgattggaaagatagattaaattattctaaattcaataaagtaagtaatggggctgattataatccaattatggatagtactattcaaacaattaagatgaaaagtgctaattataaatcaaatgaagttcaagttaatttatatcaaaatgatgatatgattatacctgaacttgatgatgttttcaatgaaaatagaggaggtaataaaaaagaatttagaaaacgtaaaagagagacaacattatttattgaaagtgattatgaagatgatggtgataatattggaaatgcaaataccaagttaaataatatacaggaaatacaaactttacgtagtaggaggaatagatcaatcaagggaatggaatctttatcaaaacaagaaacttttttcaatgatgaaactattagttatgataaccataatgatgatgatgatgatgatgatgatacaccagttttcaaatctcgtagaagataagataaaattatttctttctttgttgtttccatttaaagacaactttaccatctttaacaagtttcttcttacttccaggtttcattaattctctttgtaattgtaatttagttttcacaatagataattgattttctctctctaatctttgctttaataaatctaattctttcttcttttcagctaatgaatcctctaattggtcggttgtatcattatcaatagttatatcatcatcatcattatcttcaattaattgttgaatttttaaacgattttctcgtcttcctaacaattctttacttgtttggaaatattcttcaggttggaaattatcaaattgattcttctcttcaacgaaaactgtatgtttaccattacttttaaataaatttggattttccaatgattttaaaatttttttattatcctttgatgaaatcatattaatataatttaaatcttgtcccttcattaataaaacttcatcatttgataaattatcagtaaattgacgtttttgaatcaatattccattttcattagttgttttattcttcattgaatgataaaattcatcatcattatgttcttttgctttctcttttaaaattttcaattttgcttgatttttatggaaattggcacttcttaatttataatctttctttttctccaagagaccaaatctagctctactagatatctgacctctctctctgtgttgtttcttctgaacattatgtactaatttagccatattgaatgtctactgaaaagaataacagtaataaaactataagaaactgaaaaaatttgaaaaatttggaaaataatttttttctgtggtgtttcccaattaggaaactctgattatcatgatttcatgttaggaacaacatgtttatttattgacaatgacgagtaaagacacaatggagagaccattgacattggaattggcagtgttgtgtagttatgtacttcagaaaccgataatgatactatcagaggatatttctcgatcattacagagagttaatcatataattgaatcatggaatgtatcattggtggaatcatatattaaagtcattgataagatatcatattggatagaaaatggtggagatacgaacagtgatatgtgtaaacatataaggagagataaatatcctttgatattgtttaaaaatattaattcagctaaagatataactatttcaagacaaatgatgataacaattagggatgatttaaatttaacaattaatggagaaataggattagatatgatcaatttggatgatataagggataaaataagtaatataactttaactattgaagttagagcatatatttacgatataattgttgaattaaggtattcaagatttgttaaaggtggattacctacatacattttattcaatttaattgaatttattaaattttgggcatttataaatgacaggacatacataactccaagaatagtgaagacttgttgtcaaataatattacctgaatgtttaaatcttacatttgttgaggaagatccaactttaatgtatggtagtgaaataaaattaattaatcaattaaataaaattataaataatgaagatattgtggaaattgcattattgaaagttaaacctccaatttagtctatgctgggtatttaatatcccaatatttaatacaaccatcagtaccagcggaaacaattttattatcatttaaccaatcgattgcattaacaccttccttatgagaatttaaaaatttaattgtccttgaaggtttttcaacagaataaattataatattagtatctaatgaagcagatacaataaattgattatttggtgaccatttaattgaattaattttagatgaattaaatgcccatcttgaagtaattaatttaaaattttcatccttgttaagactaaataataaaattttaccttgaacatcaccacatgcaaaatattgattattatgagagattgaagttgaagttggtttattatataatttatttgaattattaattaaattcatttttaaatcataaatattaattgtatattttttactatcagtaatgataataaaattatctgaaatatctaaacttgaagattcataatctaatgggaaagatttaataaattcaccatttaaatcatagaaattaatttcatcttcgaaaagaactactacatttgtagaattaattttaagatcaattggttgtttagataattttaataatgtctttgtagttgaatcttcattaattaaatttaatttatcatcccatgaagttgataataggttttgactatttggtaatccttcaattgatacaataagtcccttatgttgatcattacctttaattaaagtacttgatgtatcattatgtttaataatcttaccatcatatgaaccagtgtataataatccattagaataatttaaagaagttatactaacttgatgtgcatcaataatttcaattggcttttcattatcattattaaatatatacaatgtaccatttaatgaaattgtaataaatttattctcatcaattacacaacaaccaagtaattgattttcaattttattatctaatgaccaagttttaattacattaccatcattaatattaattaatctaagtgaacaatcagcacttgaaataataaaattttcattattaatccaatcaattgaataaataccaccatttgttaaattagataaagatttcaataattcaccattattaccattgaaaattgaaataattctatcaacaccaacagttataaataattcaccatttggtgaatatcttaccattttaataaaatttgaatgaactttagtacaagttgaaataaatttaaatggtggacctttaaacaaaacaacatttaaatcatcaccaactgtaattgcactataaggtctcttttgtctaatatcaactgaattaatttgatttgaatgtccaataatttctccaacactattacctgtatccattgtaaagcaatgaccaaaagtttcactaccattaccaacagctataattcttttactatcagaatcccaacttaaatcattaattctatttgataatattttaaattcactcttaattctcatttcatcatttgaacaatcccaaattattacattacccatttcatcacctgatgcaatataataaccacttggtgatattttagcaactgtaactgggaatttatgaccattgaaaatccaattattattattatcacctaatgaacgaatgataacacatttacctgatggataaattaatttatttcttaatttatcataagataaatgagtagtaaatgaacgtttagtagttggattagatactattgctttatcaagtacaattgacatacctatagaaaagaaagtgttatatataaaaatagaaatgattatatgtatgattacatacgtggtttaaaaatatcttcattttcagcagtttcaatccatttatcaatgagatcttctttaagaccatgtttatcatacatttcaatcaatggaatatccatttgggatggatgtgattttaaatgactctgtagggtgaaataagatgtaaggtatatcaatctttcaattgccattaatggattattatgttttaatattttccatattgtagtatttgaaagtatacctatattagattcagatgagattaattcttcacgtaaattgtaaaataaatcattagatgattgattcattgaaattatggatgattctatatttggatttgaatctataggatcaataataaattcatcaaccattgaatccataatattatcaaatggactttcctttgataataaatttggtaaattaactaatttttcatcatctttaaatatagtttcaataaatataaaacaaccaaaatcaacaattccatcaatttcattttgtttatcaatataaccttgaggtaataaaataccatatttaatatcatcattagattttttaactaatctaatcataccataaacattatttttaatcattgaatgccataattcatcataaatagttctatcctttaatgatgaatttttattagggaatattactaatgaatcattctttaaataccatggaggaattgaatttttagggaaaaaattagttataatcattgatttaattgattgaatggaaagtaattcagttggtaaatcagatacttgaatattagaattaccatatctataaccttgtgttatgttatctataggtatttcttcattattatcattaatgtaataataataatatctatctgtgattttattgtgatttgaaatatgtaatgattttgtattaatataatctgataatcctgtacgtttaacaaatggataagctgatatgttaaatgttaacgatgggtaatttaaaattgataaatgaaatgaataaatttcaacaggtttctttaattttggtacataataatttgttttagttaatgaatttaatgcatcatttaaagtatagaggaaattagattcatttgtaatattggaattaagtaatgattcaaatgatgatatgttagaagtatgaattggagagtttgaagttgatgtatctatacatattagagatattgatgaatgaattgaaattaatgaattaagtttagaattatagttttgccaatccaatgattgattaaatgatgatatgatgattatttcacattgttttaaatgagatgatgattgtaaaaggttgtaaaggtatggaagtaagtctgtatttgtatctttatcatttttagtatttaatgatgcaataaaagttgttaagattgaccaattaagtggaattggagttgttggtggtaatgggaagttaattaatgagaatttatttgatttattaaacagtatagggttaataaggtaattgtatgtaaagagtgatacatttggtgaagtatcattaactatataataaataactttagacatgtaaaaagaaagaatgtacaagagagagtgatagtaagatatgattatttaacttttttagccttaagcttaatggtttcaccattaaagtaaatacctttacccttataaggttcaggagatctcatatttcttaatcttgcagcaaataagtttaatttttgcttgttggcaccttttaaaaccaaaagagtttgtgaaggagtttcacaagtaataccatttggaattggtaaaccttcaacattacatctaccaactttcattttaacccatttaacattatcgattgtttctaaattaactctataaccagtaccttgaaatcttaaagttgatgaatgaccatcagttacaccaataattgcattattaattaatgaacgataagtaccccataaagatttttgaattttatttttatcattattaattgaaattgaaagggatgtaccttcattagaaatatttaagaaatcaggtatttgtaaattaatttcaccatttggaccgttaattgaaagtaatgaattaaggataattttctgtgaaccttttggtattacttttgggataagcatgttgacggaatttaatttaacatcaggtgtgaggaatacaggtgatgaacctatatgagatagagatgatctacaggaagagaatagacgtttggatagggattgcattgcttaaagaagagtataggatatggatatatggacatatattgaaaaatggaaaaattgaaattttcatgttgcaaaataaaatttttatttcttttcttatttcatttattcttctttaagacaacactatggtaaggaaattaaagtatcatgaaagtaaattacttaagaaagtagatttatttaattataaaagtgataataatcatagagagagtgagattataagtaaatatcaattaactaatagaaatgattatcattcatataataaaataattggtaaaattaagaaaatggttagaaaattatcccttttggagagtaatgatccatttagaattaaacatgaacaattattattagataaattatattcattaggattattaactaatacatcaaagataagtaatattgagaataaattaacagtttctagtatttgtagaagacgtattggagttataatggttaaatttaatatggcacaaaatattgttgatgcaaataaatttattagacagggacatgttagagttggtaataaagtgataacagatgttgcatatttaattaatagaaatttagaagattatcttacatgggttgatgaatccaagattaagagaaatgcattaattttcaagaataaatttgatgattataaattagtttagtttaaaagggtatttaatttattattatttgtatttgaagattttttattaagattataaggtaatggtaaatttaattcaagtaattttaattctttccttagtgaaatagaggaatttgataaatctttataacattgatcaataattgaagttatctctgtagtatcattattatgactttcaccattatttaattgttcaattttattaattaattgagaatagttattaaggaaagagataagtgttaattctgtattgtgtattgattcaatacgtttattaatgtatgtattgtccattgtgtagtaagatatgatatatgatactatactatactatactatactatactaatactaataataataagatactaataataataataataaactaatagtcccatcgacgcaataataaaataaaagacgcgactattataaatacaaacccgcactccccacacgtgacccacaccccagttacccgattgggacagtatacacaaaataaaaataatttacttacttacttaataaaataaatttttcacttactctatctcactatttaatactttactatcaaatcttattactacactttatttcttttgaacttccttctattccacaatacaatgtctgataacgaagttttagttcttagaggtactttacaaggtcataatggttgggttaccgctctttcaacttgtcctgcaaatccagatttattattatcctcttcaagagataaatctttaattgtttggcaattaactagagatgaaaatcaatatggtgttgcaaagagagctttaaagggtcattctcatattgttcaagattgtcaattaactccagatggtagatatgctttatctggttcttgggataaaactttaagattatggaatattgaagatggtgaatgtgttactagatttgatggtcatgaaggtgatgttatgtcagtttcaatttcaagagttgttagacaatttgtttctgcttcaagagataaaacaattaaagtttggaatgctttaggtgtttgtattcaaactttaaaatctcatgaagattgggtttcttctgttgaatgttctccaactaatgaatcaattgttttctctgctggttgggataaaaccgttaaagtaggtactacacaatttttttctttttttcttctcttctttattaagaatatcattccatatgatgttagaaataatatttgctacttcggacactcttatgagtgaatgagacatataattatcaccaagatctctgatggttatgatattcttaaaaaaatctccatttgatggaatgaaatactaacatacaaatctcccccctctatcactattacagacttgggatatgtccgatgcttcattattatcaaactttattggtcataatggttacgtttcatgtattactatctccccagatggatcattatgtgcttctgcaggtaaagatggttcaattgttttatgggatttaggttcaaatgaagttttatttactcttaatgcaggtgatgaaattaatgcattagcattctctccaaacagatactggttagcagctgcaacttcaaattcaattaaaattttccatttacaagaacaagttttagctgatgaattaaaacctgaagttgcagaaggtaagactccagaatgtgtttctttagcttggtcctctgatggtcaaaatttattctctggttatactgatcatttaattagagtttggcaagttatgacttcttctgcttaaagaagttgtcgttactaaactaaaacaatctttttaacatttcttttcttttcttttcttttttactaagtaactcatataaattataaatttcttatagtaaactcctagtaaactacataacatgccttataataatttcattaactaatgataatttatatgcaggtccaaatccatgacatttctccttacctcttaattcttccattattttacttatattaatttcaacatcttcatttaattgtttaaattcatataaataatcccaaattgcacttatagttaataatttttcatcattaatttcatatgattgtccaattagtatattactattattactatcatgttgacttaaatcaacagatttattaataaattctttctttgttgggaatttaaacataatattgtcatttcgattatcacttactggactaatacttatactactactaccaccacttaataaaatttgattctccatacctaacttaacattcttctcccttaactgttttaattgaatctctaacttttcacgttccttctctgcattttgaagtttaatagtaagttctcttaatttaccctctttacgttctctaaatgctctctgtgctgctctattttgtgccttacgacgttcatatgtttcatcatctatattcttgtctgtagtataatattcagtattaaatactggatattcaccataattattgtcttccattatcataaagaagaagttaagagaagactacatgatatatttttttttcatgtttttttcctagggtctttcttttgatatacaatgattaatccaatagataggtttaataatgatttaaataatcttatatcctctatacaatcatatcatcctaatgaatcattagcggtggatttaattaatgataatgatcaaattaatgatataataaatgaattacatattacaaatgataatttcaaatcttataataaatcaatggaaattaataataatcaattatcaaattcattaaattcaatacttgatacattagttgattgtaaaagagagttggataaattacctaaaaattgtatagtggataacacagatgatgataatacaaaggaaattttatcatatgctttaaaactttcaaaatttagtaaaatacctaaaacttttgatggtatgttattaccaaataattttatttggccaggtgatgataatttacgtagaggtagtttggcaattacttcaattatacctgataaaattataaattatgaaaattttggtgggaattataaagaaatagtggaagagaaagtacctgatgaaattgtggaaaatatagtagttgatgatgaatctgatgatgaattattaccagagagaaataattcaattgataattcaattcaaaaggataaattatcagttatgtcaggacttgatttattagattctgatgatgaatagatttagtttagtttagtttaacattttagacaaatcattttcaaaattatttaatgcaattttaagtctattaacttcttcatctgtaatcgtctttgcatctttaccttgtaaactatcatttttccattcatgaaactctttatttaatttatgtaaactttcctctaaattatcaaattcaacaatattattattaatttcttcttgattatcataatctggtaattcacctgtactcttttctttcttaatcatttctaataaatcagttgcagaatcaaattgttctcttaaatgtgctaatttaacagcaactggaatttctgtaattatctctgtatccttttcttcaatgtttttaaggtgatattttttgaaaaatttaataactttaccactaaatggtccattgaaagcaaataatgtcaaaaaacatccaatatgaacccaaaaataacatgatttccataattcaattgatttaccaaattctaatatattaaaaggttgaactgcatatccaaatactaattgtgttaaaatccatgaattaatatcataaaatttcttaaatttagaaacttttttaccatctttactaatgaaaattggtctaatatttcttctaaaaattttaccaacactttgcataaatgctccaagtataaatgttaaataatatcctggtaatgtaccatgccaaaatgctgatgttgtaaatgttataattgttggtataataccaacttttaatttatttgtttctttatcccttgtacatgttcttaaataaataaaattttttaaccatttatttgtattcatattccaactttcaagacaatcatgaacattttgtcccatttcaaaccttagaggatcaatattttgaactctattccaatacattttatcattaacattatcatatccattatatcctaatccaacaacaatacatgaaccttcactaattaaccaaactgcataatatttaaatctttgaaccataccaagtatccaaatgaaaactaatttataaataaatgatttattatatttaaaatcatcagataatgaatattcaattgtaattttaggtgtaagataaacaaataatccaatccatataaaaccttgtaaaacttttaaaagtgcaattctaccacttttaggtatcttacgtttacgatacttaccaggttttttattatttggtacatcattaaataaatcagttaaaataaatttttcataatctgcataatcaaatgatggaccagttaataatgatgcataaaagaaaacataacctaaatatgaaattaactttggatgttttaaaattgctctacttttctgataagtatttaaatttgattcaaatttctccttatcctttaaaaacaattgaccatctaaatatgaccaaccaaatgcacttaatttcataaccataaccatttgagcaccagtgaaatcaatttctcccggatttaattgagcagtggtaaattgtgcatgaatatgattaatacataatgaccccattaaaacaattaaattaacccatggcataaatcttgatttataatattttgttaaaaaataagtgaacaaggagttacctagtatagtgaagaatcctttaaagttttcaataataaagaatatataaattgaacttgcaattataatataagtattctttaagttgattttattatctggtaatcttttaaaaatagcactaattgggaatgaaaggaataaacaaaccaatgtcttaattgaagctgcatctaggcccgtgttggtacataggtactctactagtatcctaaatggattgtaatgatcaattgattccatattgtcaaaagaaacaagtgttgttaataaatcaaaaatggaaattaatttttttttttttgacattttcatgtaagtgttttcatccaatcaaataaacgttttctaaggacaatgattatagtgtatagaccagtatttagaaggagtatctttaatttatctaagatatccaagcagttaagtaaagagacggatgaataccctaatgcacagagatatactatagttaagaaatttcagtaccctaaatcattaatttatcaattaatttcaagagttgatttatataatgaattcataccttattgtacatcatcatttattaatgagagagattcaattactaatgaaccatcaattgcaggtttaagagttggatttcaatctttcaatgaagaatttacatgtgaattacaatgtttgaaggataataaagtaattgcaaaatcaataactcattcattatttaaaatacttgaaactgaatggaatgttaaagatgaaggtgattattgtattgccaaacttgaattaaaatatgaatttaaaagttcattgtataatcaagttagttcaatatttgctaaaaatgtatcaaatttaatgattaatgcatttaataaaagagctttagaagtatcaaacaataataaacttttacaaaaatatatatagacttatagacactactcgaataacttacatgttgcatcacttaatctttgagctgctaaatctaaaattgaaacatcatcaacaaatgaaattgcagttctaataaaattagatctttcagttgaaaattcacttttaacactcatattacgacctaaaactgcaagtacaccaatttgggcactattaatataaaatttatccattaattgattataattaataccattaaattcatttgatttttcaatattaataataattgatacaaacataccacaatttggatcaattggtgttaaataaccttctttaaaagcttttgttttcattaatgaattaataaaatgatttttacgttttaaatattcatttctaactttagtaatccattgaatccaaccttcaataccacctaatttaataattgtattattaacgaaaatttgtgaaaatccacttggtgctcttgttaataattcaccagattttgtaaataaattaataagggctttattaataaccatataacctaatcttaaacctggtgcataaattttactaaaagtttcaattctaataactctaccagtagtatccattgttgtaaatgatggatttaatgaattaataaattcatcatttgtaagattataatttggtgtttcatcatatttagtgaaatttaaataagaatatggttcatcttcaagtataataaaattatgtaattctgcaagttgataaattcttttcttatgatctaatgattgtgctaaacctaaaggattatgaccatttggaattgtatataacattttaggttttgataaattaggatgaatggtgtcccaattatttaacattttttctaattcatcaacataatcaattttatgatccttaataaggttatttaacttaattggaattggtataccaccaaattcaactaaattatttaaaactggagtaaatgtaaattcttcaataagtacggtatcaccaggattaatgaaaatatcaaaacatttcattataccatctaatccacccaatgtacatactatatcccaatcatttgacacaggtttaacaactcttttaacaaattctttaatttgatttcttaattcaatttgaccattttgatcagaatattggaatgaatttttaatatcaacttcatcatcccttgtggaaacatcgttaatttgaaatgacaaatcatcatgtccacctttaaaaggttcttctcttaattgaacatttgcaccagttactgggaaaaatccataatttggtaaaccaccaactaattgaattggatctttatgtgcattttcaacaattggtacatcttgccaaaaataaactggatttctgtttttgcatctatctgataccaatggtagtaatgggaagtcttctgtcattgtgagagtacttgaaaggtacttaaaagaaagaattcaaagaagaaacaagtggttgtaagaagtgtaaattcgatgactaataccccagacggtctctttatataagggtagccgtgcggcatcacatctcttttactgggggttcttctatggttatagggggtatgactaatacttagtatactctactctaatactctactctaatactgtacactactatacactacactactgtagtatattatatagatacatacactatcatgtattataaaagacataaagacatagatagataagcccaaataggaaattgcgaaagtttccactgataagcaactgataagagatgtctctatttaaatatcactgtttattcttctttggtggtctctatggagagtaagtttagggtaatggacatgcagactagtatggggaaggccaatgacactagtcaagcttttaagaggagaaaaagtggtaaacatcaaatgtcagcttgtatatcatgtaaacgaagaagaagaaaatgtgatggtaaatatccgtcttgttcaaattgtatacgattcggtgaagaatgtacaatggtatatcctccaacggggaaggaaattaaaagagattatctggaacaactggaatcaaagataaaggaattagaagggaaattagatggtagtagaagtgttagtagtagtattgttccaacagatcttcatgaagaccattctgatggtatatcaccattatctacaatttcatcatcaacgagaagttcattatcagtgaaatatccaccaacttcaaatggtaaaacagaattagcagatcaagtgggttatataactttaggtgcatctggtgaaactttctatattggtgaaagttcagcttattcatttgctaaaattattggatcttcatttaattattgtccaatgagtggtaagaatagtaatatcaatacaaatactcataatgaccttccatttaaacctcctaatattaattatgcaaataatttattaatttcatataaaaatactgttcaatgtcaatatccattcttagattggaaatatattgaaaaatgttttaattcagtaatgttaaacaattctaaaaatgatttagaaaatttctttatttatatgatatttgcaatttcaactcaaattattgatgataattcaagacaatattcaaaatcttattataataaagcattagaatattcaaatataattttcaattcaattaatattacaactgttcaagctttcctattaatggcaattttctcacaaaaggcacctgatggtgtatcctgttggcaatcaattggtttagcaattagaactgctgttgttttaggattacataggaaaccttatattaagaaaaatcaaatattaaatgaatttcaaatacttgaacaagatttaagatcaagaattttttggtcagcttatggaattgaaagaattaatggattaattttaggtcgtccatttagtatttcagatattgatattgataccccatttccattggaaattgaagaaaataaagttgcttgtcatgttgttaaattaaggactattcaatcaagtatttgtacttttatctataagccaattacattattagaaaatgaagataatcttgaatcaactagatttgaaattttattagaattaaattcttggttgaaaacttatccatgtattgaaaatgcaatttcaacttttgaaactaaaaattggtttattatttcatatcataattcaattttacttttacttagacctgttattttggaaatttcaaaattaaaggataaatcacctaaaaattatttagaatggttcaaagttttcactgaaagtgcttctgcaatttgtcttaattataaagatatctacacaaagaaaaaattaagttatacatggttagcaatgcaatgttgctttgttagtggtatatctttcctttattgtatttggttagattgttcacttaatatactaaaatggaaacgtaaaagtttggtatttgaaacaataaatgcttgtcaaacattactttatatatttgctgaaagatgggattctgctcaaagatttagagattcttttgaaactttatcaaattttgttacatcatatattgaaaatggtgataatattggtgaagataacaatgatactaataatattacaaatatcaatactacaataaacaaaacggatgaattatcaattgaaaatcaatttttaaatactggattgtttgttgatggtagtattgaaattgatacttatttaacaggtaaatcacttcacgataattttggtaaaaatgaaaataagcatattgacaagaataatgatattcatttaagatcaaataaggagaaagatactcatttatgggagttcttggatagtgttggtgataaatatttacgtgatttatttgttgaaatggaagattcctttaattataaataaattttttataaataaataaacattatgtattatatgaaagttctttattacttctaactcttttacgataaccagcttcaaaattttcatctttaggaagtgttttacattttaaacctgaataaaaccaattaaacattgtaataccatcatactaccggtaaacctactttttcttgaattgccttagaatatggtggcatattagtacattctaaaacaattgctttaacattaggattttccttaaccaattcaactgccatttgtactaattcttcctcgagatcctttgcaatatatggatcaccaaatttaataattctttgtaatggattattaggtttacaaccaacaacaataattcttttcatcatttcatcggtaactccaactccattaaaatgattcttatttaaagttttcgaatcaaatgttaaaacaccaaccatattctttgaagatgttgttgcaagtacatatggaatttgtaataaactactagttgcaattggtatattaattcttgatgcaattttattttgaatttgtgctaaaaatccacatgaagttacaataccaatacatcccttttcttctaatttattacatgcttcaacataacaattaatataatcatcatcaaattgttctgatttaacaacattaactaatgttgcattagtcacttgttgttgaataacggggaaatcataacttatactcataattacatcccctggtggtctgtgaatatcatcagtgtaatctaatgtaagtgcacctaatggtggtagttcatctttactttcactataataagacattgtgtgcttgtctatagtgtatttttgttttattagaagatactacccatacagtgcttaaatagtccataccagactatacagatcctccccagatcagtcacagagacggaaagataatactccgataagaggtggaaatagacactgataagattagataaggcgtatattcccaaaacggaaattttgcaaattttgttatctttccgccacggtattttaacttaaataccaacggttctgctgttttcaatctgtggatttggaagtaccttctttcttttaagtacaaaagtatagggaaaatgactaaggcaaaggctagtgttttattaattggtacaggtggtgttggtacaattgttgcttgtggtttagcatacaagaatttatcaacagtttcagttgtggttcgtagtgattatgaaaaggtgaaaaatgatggttggacaattaattctgttgattatggtaatttaactaattggaaacctgatcatatttatccaactgttgaagatgcaggtaagggtcaagaatttgattatgttgttattacaaccaaaaaccttcctgatgttattaaacctgaagatgtggctgaacctgcaattacacctggtaagactacaattgtgttaattcaaaacggttttgatttaggacgtccattcattgctaaatatccaaacaacatttgtttatcaggtgtctctcatattggatctcataatcatggtggtgttattaatcaaactcaaggtgataagtgtttaatcagttattttgataattctaactttgataaaacaacacaagaagcaaaggctaaagaattcatcgaactttattcaaatgataagaatgatgtaacttattttgctgatgttaaatggtatagatataggaaattagtttataatgcaactttaaataccgtttgtgcattaactagagttgatacaggtagattacatttagcgggtacacttgaagcagtttcaattccagcaatgagagaagttgttaaagttgctaaagccgatggtgttgaattacctgcagatgttattaatactgttgttcattcagatgatggtgattggtttaaaccttcaatgcttgttgatgttgaaaagggtaatccaattgaattagaggttatcttaggtaatttacttacagttgcaaatgaattaaaggttgaaactccaactttaactattctttatcatttattaaaggcaacccagtttaaacttaaggaaggtaaaggtttgattaaagttcctgaagagagaccaattaatgatgttgtttataattaagttatttattgtataatttgtatattctatattgattattgaatgtatttttttatctctaatatatgttaaaatttcctttaattatgcaatttattatatcaaatactttttctgttacaaaatcaccagtgaaaaatatatatttaagcttaaaattatttgaaatattataaatattctaaaagaacaatgtaaaaaaataactataaagaatatctaaattcaggattctcaatatcagtaagatctgcaaatgcaatattatcaggtactttatacttttcacctaattcagcaaccatcttatcctttttaatatttctccatttgtaaagaccatataaatacattacaataattgtaccagcagcaaatgaaaccaacattgcagcctttgcaccagaatatccaggagcttgatttgcattaaaagtttgtggtccaataatattacctgtacaataaccaacaagataaaacatattaacaacaattttctttgtattacctgcaacatttgaagaaatagttgaacaaacaccagctgaaactgctgttgcaatataaaatgataaataaccagttaatcttgaacctttatgatgagtaaaatttaacaaacacattccaacaacaacaatacaatttacaataatcattgaaattaatctttgattattaaaacaataataattaattaatgcaaccattggtggaataataatatcaataccaccacctggcatattcattaataatgcatctgctgttgaaaatccaaaatcaccattaagtaaaattgaaccaaaattagtgaaaccaccatttggaattgcatatgacataccatagaagaagaacgcataagtacatggatcaagtattgcttctttaagttgactcatcttaaacttttgattaccaaaaccttgttgattttcctttgctctttcaagaacatataacttgtctttctcatttaagaaccatgccttggttggaacatctggaatatgaactaaactaataattcctagtaagattgtaatacaacctgtaatgatatagacacatttccatgatgcaaattcatgatgaccacctctatgaacttgtaaaccatatgcaatacctgcacctaaaattgtaccaaaaccttgcataccccaccagatacatgttctcataaattgttcactctttctccaccattgagatgttaataaaatatatgatgggttcatgaaaccttcaaaaacaccaagtagaacacgacatgttaaaaaaccagcagagttagtacaagcggcatgacacataagaataatcccccagataataacagcagtagataaagttttagataatggaaacctttgtaaaagacgattagcaggatattgaaatactaaataaccaaaatagaaagatgaaccaacccaactatattcctttgctgacatatttaattcttgtctcatacccataattgaagcataagaattagttgttttatccattaattgacatgacattaatgcaacaataataggtaagatatgccaatcaatctttcttaataatttcttttcatatgcaggatctaattcaaaattatttatatcatcaatatatttcattgccatatcggcatcatcatcatgaacatgaatgactttaccgtttaatgaaacaacagtagataatataggatgtaattcatcaattgattcaacattaacatcaatgttttgtttctcagtgtcaccgtcggaatctgatttagacatgtatattaaattgtattgtgtttgtttgtttgctgagtaataaacctaaacaagaaaaataatcagaatcagacaaaaagtaattacaaggatatttatacaagacttttcaaggatgtaataattaaaagataagaacaatttcaatgtgaaaaataataaactttcttatcttatcagtagcaaccataatagacgtaatgaaaaaattaaaatggaggcggaaagattgacgttcgcccatgaaaaatttcccttatcggtaaggtacaccgtctatactgggcggatctttaatgttatcattatgattattatgattataatattacacagtgtacacatggagtaactaaagtttcggagtagatcctattgtccagtccttatctgatgccattattgtatctttcaaacatcttggatcatcagtaccggaattaattacattaagcttatctctaactctgttccaggagaataaatcacggaataatttatcacccgtagaattaataatatctacagctacatcaccaatactccccaacatcataaatgcatgacctgaatctcctcccattacgaaaactgaattatctttgtaatatggacaatatgaaattaaataatcattatcttcactatctgagtaccaacataatcttgtcattgtaattttagtaagttcaggcatatgaattctaacaaaatttttaatttgtttcattgcaaataatggaatattagtctctgtattatctggactccatttggttttaactttagaatttataccattagttggattaatccattttaatcctctatatccaactttaatatatccatttgtacatgggaatccatataatccaccaattgcaccatctctaactttatatgtccaagttgggaacttatccattgcatatttttcttcaatataaggatcatcaactttaaataaacaaacagatccaccggttgcttctaatttttcactcatttcaggaataatttcacttgaccatgggccaacacaaacaattaaattatcacaataatgtgatttaccatcacttgttttaataccaatacatttattatcattttcagttaacaatttagtaaattcaccttctttaccaaaatatgtctttaaattatcaccaccctttgataaacatttttgtaaaacccatctacaagatttatctgccaaaatcatacctccagttgtatccaataaaccctgtaaatgatgaccatttttcttcatttcaaatggatcaacagatttttcatgtaatcctttacctacagctttctctattgcatcaggatctgaaacacagatagaattctctggcatgttttgtaatgttaatctctcaaaatttggtaattctttcttatcagttaaatggatattaccagtattataataaattggttcaccaccttcccaattagtttccttaatctctttattccatttaagaaatttttgtaaacttaatgttgacatttgttgataatgaacttcttcaccatatgaagaacggaaaatcttattaatatcagaggatggactatcacatcctttcaaatattcatatcctttaatgagataatcacgtttatcgaataacttaatattagtgtatccattttcaattagagacagtgtagtggataatcccataacacctgcacctaaaactataatagcattatctttatccatctttggttgtttattcagagatagtcataaagaagaactgtttacatactcaactgtatattaataaaagaaagtttcatctacaacctatataacacccaggtggaaagattaaccataatatagtaaataataaatttccactgataagataagataagataagaaaatagactttcttatcagttgacacaatatgtccgctttccttatcttttgttgatcatttgcatattaacgtataacaggcggttatatccacctgatacattactttaatacagccatatattctcttatgatctacattgtctgccactcaggtgtattactcaacctctcactgtgagtcatagtaagcattacgtaacatattgcatgatcattttcattgattgtcattgattcaactgtggaaaagttttcgtttgaagagtatcgtcaacttcgtcttctttgattgcaagatcaaactatatgtcaaagactaatgtattgttgattggtaccggtggtgttggtaccgttgttgcatgtggtttggtttataatggttcatccacagtttctgttgttgttcgtagagattatgaaaaagttaaaaatgatggttggacaattaattctgttgattatggtaatttaactaattggaaacctgatcatatttatccaactgttgaagatgccgctaaagatcaagagtttgattttgttattatcacaaccaagaatattcctgatgttgttaaatctgaagatgtagctgaacctgcaattactccaggtaaaactactattgtgttaattcaaaatggttttgacttggcacgtcctttcattgctaaatatccaaacaacatttgtttatcaggtgtctctcatattggatctcataatcatggtggtgttattacacagagtttacaagataaatgtatgattagttattttgaaaatccaaatatagaaaaaccagttcaagaagctaaagcaaaggaatttgttcaaatatattcaaatgataagaataatgttacttatttcccagatgttaaatatagtagatatgaaaaattaatttataatgctacaatgaatacagtttgtgcattaactggtgttgatagtggtagagtaaaattagcaggtgtacttgactctatttcaatacctgcaatgtatgaagttattaaagttgcaaaggctgatggtgttgatttatcaactgattttatcgattttactgttaaatcttgtgattcaggattttataaaccttcaatgcttgttgatgttgaaaagggtaatccaattgaattagaggttattttaggtaatttacttacagttgcaaaggaattaaaggttgaaactccaactttaacagttttatataatttattaaaggcaactcaatttaaaatgaaagaaggtaaaggtttgattaaagttcctgaagatagaccgatcaatgatgctgattataattaaattagttttattaatttatctaattatctatttaattatctattattgctataaagaatatctaaatttaggattttccatatcagttaaatctgtaaatgcaatattatcgggaacttgatatttattgcccatttctgcaatatatttatccttttgagcatttctccattgatataagaaatataagtaaattaaaattaatgcaccaactgataatgaaactaacatggcaattttagcacctgcataacctggagcttgagtttcattaaaagtttgtggtccaacaatattaccaacacaataacccattaaataagatgtattaataacaatttttttagtagttcctgcaacatttgatgaaataattgatgcaagacctgcagatgctgcagctgttaaataaaatgataaataacctgcaagttttggacctctattatgtgtaaaattaagtaaacacataccagcaactacaataagattaacaataatcattgaaagaagtcttctatttttaagaaaataataattgaaaagtgcaataattggtgggaaaacaatatcaataccaccacctggcatattcattaataatgcatctgctgttgaaaatccaaaatcaccttttaataaaatagaaccaaaattattaaaaccaccatttggaatacaatatgacataccgtaaaagaaaaatgcataagtacatggatcaagtattgcttccttgaattgattcatcttaaacttttgattaccaaaaccttgttgattttcctttgctctttcaagaacatataacttgtctttctcgtttaagaaccatgccttggttggaacatctggaatgtgaattaaactaataattcctagtaagattgtaatacaacctgtaatgatatagacacatttccatgatgcaaattcatgatgaccacctctatgaacttgtaaaccatatgcaatacctgcacctaaaattgtaccaaaaccttgcataccccaccagatacatgttctcataaattgttcactctttctccaccattgagatgttaataaaatatatgatggattcataaaaccttcaaatataccaagaagaacacgacatgttaagaaaccagcagagctagtacaagcggcatgacacataagaataatcccccaaatgataattgcagctccaagagttttagataaagggaatctttgtaataaacgattagcgggatattgaaatactaaataaccaagataaaatgaggacccaacccaattatattcctttggagtcatatttaattctttttgcatacccataattgaagcataagaattagttgttttatccattaattgacatgacatcaaagcacctaataatggtaaaatacaccaatcgattttccttaataattttttttcatatattggatctaattggaaattatcaatatcatcaatatacttcattgcaacatcaacatcatcatcatgaacagtaatttttttaccattaactgataaaactgttgataaaactggattaagttcatttaatgagatactttcagtatgaatatcaatatctgaatctgattttgtcatttggcccttgttaaagaatgtatcattatggtagtaatttaggatactttgctgtggtatttataacagtaattggaaatatattccacaatttagaggaaataaaattggggctcaacggtgactgataaaaaaattcagaattgcctatttgggaaatgtatggagttatcattgcattagttattgaattatcttgaacaaacgggagaaatatccgccaagttgtttaacattgaaagtttatcgaaacctgtggttgttattaagttggagcagtggtggctgattaaggttgaaaaaaataattcttttcttcagtgaataagttaaatattaaagggtttaaaactttaattagtttttttggtacccttatgtcaactggtaagtgtttaatgttataaattagtgtgttttgaatttttagaatcatgttaaaactaaagctatacaattattttgatatttaaaaaatattttatgtataaatactctttatttattgaaaatgtttagtttttagttttttttgtaatttaggtagtataactctattacaaacttataatatttattttaagtaatacatttagtgctaaatacacttacaactgtagtatttaaccaatagaattacattataacaacaatttcaatgtcatgctctatgttacgtaatatttccaataataaaattttttcaaaggcaacaattaattgttagaataagttaatactttatagatgtcttgtttataagatgtaatatagtctataagatagtatacctctattgaaagatgtattaatgatatggataatcaacataatctaattaaataaatcttcaggtccaaaactattaggtaataattcatcaattgttttaattattttctctgatgcatcattattaaacattataattggtaattgtaatgatttaccattatgaatatttgaacctgcaaattctctaataacttgtctacaaataccacatggtgatgaacatttaattgaatctgttataactgcaattattttaaattctttttcaccttcactaattgcctttgtaattgcagttctctcagcacatatacctgcaggatatgatgcattctcaacattacatccattgaaatatttaccatttttagttaaaattgtacaaccaacatgaaattttgaatatggacaatatgcaaattcttttgctttaagtactctaatctttaattcttcaatttcttcctctgttactaattctgatgatgtctttgtcatttgttttgttatgttgattcaattgactgaaagaaagaagtgttaattataatcagagtatatcattgttaaggttaattgtcattattattattattattattatcccaataaggaagtttagccgatggttgtattatataccaatgtactgtatcagtaattgtatcatccaattttaaaggttagttggtaatacctttattgagagggtgttagtgagtgatatattatattcaatactaaggtgataatgtatttaaaagaatatgataccaatatagtaacaaataataatgattaatgtgttatcaaaatgcggaattatgattccgaatgtgaaatttctcaattttcttatcagtgtctaaaattaaattgataacagatatagtatatatatactgatccattccttttgcttttgatttctatacaacaacctattaagacaatcaaagatgtttgttacatttgatctggataaacaaatgaaaaatgttgaaagtatttcaacaatgaaaacattatcaaaaccaactaaatcagatgaattcccatttttccaaaaaattgataaatcagagaatgaaagattaggtatacgttcaagatcacgtaatggatgtcaagaatgtaaaaggaagaagaaaagatgtgatgaactaaaacctaaatgttcaagatgttgtaaatctaatttatcatgtatttggccaacaactaatgagggtaaaggtaaaaaggataataaacaagatattgaaaataggttagtatattatggtaatgaagttaataatgatattaaaaatcatattgagagagacgaatggaagaataattgggatattatattaattgataataataataaaattagtcctaatgataatgatgataattataataatgataatgataatgaaacgtttttgattgaaacattgaaaaatattcaaagtccagataacaattcatttaaatatgaaccattttttccagataatattgaaataaatatcaatacatatccatcagcaagattattacaaaatttagatgatattgaaataattcatttagattattatagaacatgtgtttcacagactgtttcaattttacctaatgagacaaatttctttttaagtttatatcttccattagcagagaataataaatcaatattatatgcattaattgggtggtcatcagttttccttaatccaacaaatgatccaaatgtttatttgagatatttgaggaaatcagttcaaattttagaagataatcataatcaaaatcgaaactatgatgaaaataagatagttactatatcattatatacaattatttgtgcagcattaatttgtgcgggagatgtaaatgaatggcaaatttattttaagaaattatttaatatattgaaaaatcaaagtaatggtaaattaagtgaattaatgaaatatattgggaataattgtaaagaatttaaatggttaatatctaattttttatatcatgatgttttatcaagttcaagtaattataaaggtacatttttcaagataagtgaatatagtgagatattaaatttaaagacagataatgaattaattgatgaagaaatagtttgtgatccattacagggatgtgttagaccattatatgtattaattggagagattactaataaatatgttgaattaagggaagaagaagatgggatgataatgatagaaggtaataataattgcaataattttaagaataggatacaattatataataaatatgagagatattataatgaattaaagactaaattaaagaataccaaaccacatagacaatcattaaaatatttaaagaatgataaagatttagagattcatttaacattatttgagacatataagattagtttattaattcaattaaatacattaattaagaaattaacacctgaatcaccagagattcaaatattattaattgaattaattgaattaattaatataattgaaagttcaaatgttaaaacatcattatgtttcccattattaattgcaggtatttcatgtataaatgggaatgataaagaaataattgaaaatttagttatggaaatgtcgaataatttcccagttaaaacattccagagaataatggttataattaagaaaagttgggatattaatgataatggtaaaaagagagttttatggtttgaaatttcaagagatcttggttggaatataagttttgcatagcaaattgaaatagaaattgaaatagaaatagaaatagaaatagattacataatcacggggatattacgtaatccaatttttttaagaaaagtccgaagttaaacaataagctttaagcgggggtattttattcatttattcggttaatggggtaatctccactcggtatatctatctaatacgttactattcattcattatattcattcattcattcattcatttattcattcattcatttattgtgttgtattgtattgtgttgggaaactccactcggtatatgaactaccccccattacagacagaaaatttaattaagtcatttagcatgtttatcatgaagacaagtatttaaatagagttggtattccccaccgttattaattagagtttgtgataaattttcaatattttaatttttttattaaactttaaaaagtcaaagaaaaatataactattaatatgattgttaaaagtcaaacaaataaagaattagattcaatccttcaagaatatactaataatggtaaattaccttgtgcattaggtgcagttattaataaagataatggtttattatatgttggtagttcaggtttaaaagatattgaaaataatgattccttaattgataatgatgcaacattagcatttttttcatgttcaaaatcaattacaacaactgctttattacaattaattgaaaaaggtttaattaaatcaattgatgatccagttgaaaattatgttaaagatattaaagatgtttatattgttaatggatttgatgataacaataaaccgatcctaacaaaaccaaagacaaaaccaactttaagacatttattaactcatacatctggttttgcttattcatttttcaattatcattataaaactttacaagatactacaggtattccaaatattcttaatagtacttgggatgattttaatactccattaacttttgaacctggtacaaaatggcattatggtgcaggtattgattgggttggtaaagttatttatgatgttacaaatatgtcattaggtgaatattgtaaagaaaatatttttaataaattaaatgcaccatcattaacatttgaacgttcaaaagatcaaataaataatacaattgaattacatcaacgtaatattgaaaatccaattgaattaaaacctttaagagatgttttacctgaaaaggctgaatttcatgcaggtggtcatggatgctttggtacaattacagattttatgaaatttttagaaattttcttacatgaaggtaaatgtcctgaaactggatttcaaattttaaaacctgaaacaattgctaactactcatttaaaaatttattacctgaaaatgttttcattaaatcaacattagattattcagatgcaaatttatcaaataaaattgatttagagaaaatacctgataatttacaaggttggacttcaagtttccataaaattgattgttcattaccaacaggtcgtggtaaatcttatagttgggcaggtttaccaaatttatattattggattgatattgataatggtattataggtatgtgggcaacacaagttttcccatttatggataatgattcacttgaatgttttaataaatttgaaactgctgtttatcaaaatttcttgtagttattattattattattattatattctaatgtatttttatttttatatagctttattttattcaattcaattctattattcataaaaatcaattatgataatcaattctgataatcaactctgataatcaattatgataattaataaacataaattatttgtaattacctatgattatttgtaattaatcataaacactccactatatcattattttaatacacattttaatcaatcattgagtaaaataccgtgatattaagtgataataccatattattattattacataatcatccaatctcttgcttagctaatacaaataaaaaataattgaatgtatgcggaactcactttcctgaaagggtaatagcacggcacttttattttcacgtgacaattgcaatacagcgccctgaaagacttgttttcacccaattgggcaatttgagccacactgggggtattacaccctatggaaaaaccgttgaaactagtgtaagccgcataggggaagtttattttagtgtttggaaaaagaaatttttaacacatccttcggtgttgaattactattaggagaaattttttatcgtgatatggatagtaattacactatgattatgatattaataatgatattaatattaatgaaataacttctcaactgtggtaaatcaagggatggattgaatatgatcttatttaaatggaattgaatttcctcttttcttgatttttctctctctagcattactttattattattaacttttaacttatcttctttaaacaaaaatcaatttatttactgaaaaatgtctgataataattcatctgaaaaagtgaatgaaataaatactgataatattgaaaaatcttcctctattgaagataataataatatcaataatattaaatctccattaacttcaaatccaaaacatatttcatctcgtgatgctgatattacacttgcatttatggaaaaatatgatgctcaaactcctgaaataactcctgctgaagagaaaaaattagctagaaaaattgttacaattattttatcattaactgcaataactaatttattactttattctgataaagcgactttatcttacgcttcaattttagatcttttccgtgatactggtttaaatcaaaataaatataataattcttcaactttattttatgttggttatatagttggtcaaattaatttaatacttgttcaaaaattcccaattggtagattaatgactgcaatttcattttcttggactgtaattattttcttacattgtactgctcataattatcaaggtatttatgctttaagatttttccttggtttcgttgaagcagttgcagttccaatcttaaatacaactatgggtcaattcttaactgctaaggaaaaggcagcaactgctcctcttttttattcaacttgtcttggtgttacaattcctgttggttttattgcttatggtgttctttatgcaactaatacaattccaccttggaaaatcttctttattattattggtggttgtacatttatttggactattgttatatttttcttttatccaaataatccaactgatgcagtatttttaaatgaaaaggaaaaagtttggattattagaagagttcaaaaaacaactggtgcttcaattgaacaaaagacaattaaaaaatatcaagtttgggaagctttaaaagatccaatttcttggttattcttccttttcttcctacttcaacaattagcaaataatttaccttatcaacaaaatcttttatttgaaggtattggtagaattaataatttagattcaactttagtatctgttgcatctggtggttttgctgcaatttgttgttttattgcaactacattcttattcttttatccaaattttactgcattctccgttgttttctggactgcaccatgttttgctgcttcaattgctgttgttacagttaattgggatgaaaaaattgctttattagcaatgttatgtttagcttctccattatttggtattccatggattttaatgttttcttggaattcaacttcatgttcaggttatactaaaaaattaactagaaatgcaatggttatggttagttatagtgttgcaaatattatttcacctcaattatggcaagaaaaggatggtccaagatatatacctgcttggattgttcaaattgttttatcattctttattgctccattacttgcattagttatttggtttattttaaataaaagaaataaagttagaaagcaaattgttgcaaatgaaggtgatgcaaaaggttttgttagtgatactgatggtgaaattgaagttgatattgcaaaccttgatttaactgatttagaaaatgatagattcatttatccattataatttccttttactttttctttttaattcatgctttactatactttcttagataatttaatataataataataatcacttttaaccaataataactaagtaaaaatttcatgtcaaagattacgtaatgaaaataaaattttttttgctgcttttttttatttaaatggacgttgagtagaataaaatttgttttgataatttaatcatcacttgttcttcttgaaagaccagtgtagtttccttattaatggaggggactcactcattaagttggggaattattggatgcttaattagatcagtctggttgctattatcttgagaaaaagtgtgcctatgaaagttcttcttgccaatcaggtattaaatcttcatttccaataatattttgatccattgattttgctagacttcctgtaactcttataccatatttttgaaaaattgatctaagcttgattaaaagatttcggggttttattgcaaagagtgagtatttaagattcataaattcatactaatgattctcttttgtttcttagatagcttcaactttcttactcgataacacaacgcacatttatttgatgctttgttcaatagttttaagatgatattattgattaaaaagataattaattataaacaaagaaaaaggaaaagaattataaaataataaagagcatcaagtatcccatcaactagttggaacacttggttttcttctaaacatcattccataatgaggtctgacatcaagcaccattttatcatgttttggtaaaccacttattggggtgatattaacatcattatctagccacatccatcttgtactctttgaaacatttttgatttcaggatgcagacatttttctaatgaaggagtaatgcatggaatccaaggagtaataatttccatgtctgcatatttgattgcaagtaaatctttgccattgtaattaaatttgagaattctcattaccttaataaacgtccactcttttcccttcttaatttttgcatagcattggcagccatcaagttttaagtttaagtgaacgaataaacacataatcgagttcaaaaacagaaataccaaacttttttcggacctgtgataaggatgtatataaattaagattcctatatataactattataatcaaatatgttcttttatgtaaaatgaaaacaatttgaaaaaaccattaatttttcggttaaaatttcatttcttgttttaagtatcagataattaaagtcttctaatatattattgattgatcattaatgaaatacatgctctttctatagttatgactgtaaatcaaacagatataaatgatgaacctagatatgctgttttagactatatagctgtggatttaacaaataaagtatgtatgaatccatatgatcctaaacttcctaaaaatttaacaaatcttaatattgctaaatcattttgtgataaattagctagtgatagattattagttcataaatgtcctttattggttaaatatcgtatcaaaactgtccaagattatcagatttgttctcctttaaaaatcaaaaaggtgatacaatatacattattgaggaaagtaattatatgaaaaatgtttggagtgtattaccaagtcattatgtacctgaacttttaacattagttaaatctttatatgcacagttatgccataaaattaatattcaatatttcaatatatcaatggaagaaagactaaaactttttccaaattcatcattaaatgatatggaaataaatttacttaaaactattgcaaataatgatggtgaatattatattcaatcaacatcattagatactaatatgattattttaatgtcattattgaaagctatgaataaaaaatccccaaattttattaatataattttaattccttacactacatcaaaggataatttcaagtcaatgttaatatcacatggcttcactgttggtgatatagatggaaataatgagcaaatctgttcaattaaaaaaaaatcagatgtttatataggctcttatcaatctgatacgaatcttaatattttactaaaagactcggtccctggtttattgtttttaaaagattgtcatgaatttatacaaagggatgattttaattcaaaaattataaaatcttccaaggaatttaacttcaatagattttctagaatattggtgatgtctcatataatgaatacagatacagcgcaaagattacataaagttttaagattaaacaatgaagttaaaataaggtcaatatttaatgaacttccatataaaaatagaatacaagttaagaatatgaattatgatgataacaatacagaagatgaaataacaaatatactaatcaaactcttgtctcattcaagagggaaaagtgttgttatcagtgataataaagataaattaaatgaactatatcataattttaagtctttagttagttcagattgttctcttttattatttaacgattctattgatgaaacttcaatcatgagtaaatttcaaaatgatcctaccaaacgtgtaatgattacaacagaatatgaagctagtgattttaaaataactgatatacaaattgttatcttatatgaatataatcctaagattgaaatttttttgcaaattttgaattttattaaatttataggaatgatactgatatttgataaaaatccaacatgtcgtacatcagaaattaaaaagttttataatattacttccaaaggaaatcaaaattgctgtaatcattttattgatgataaatttatcaaaaagcttaatcaagtaattactgaaccattttcatttggatatattgaagatgaactggaaactaataaaagagggtttttagagggtgatgcctctaatgaattagtagatacaactaaacgtcgtaagattgaagaaattgaagaagctaagccacctgtatttaattccaataatgaaatagatgaacatgatagttctaaaagtttgattgataaagctggtagtttttcaagtattgaaattacaccagttaaaaagaataatccatcggagtctttgaacaaaaattcaaatttcaataagttgaatttattggaaaacctatacaaatgatgaagttgaattgcatttcagaaattcattaccaaaagatttttcttatttccataccacatctttaactgatatgaataaaattttagatgaagatattggtgatgtgagaaacagtttggttggtgttgaaaatttgtatggaaaatttccaatactgagagaaatcaatagtgcaaagtataaattatatgattatttgttgattgaacatgtctttaaagatccaatgtttatttgttgttttgcagaacttgtgcatttaacagatattgttccaaatgaatacactattctttttttatgtgcagattttattatgtcaatttttgaaaaaagagatcttgggggtatgaagggaagattgacgcaagtgaattcgaaaacatcagaaaatgcgtgtggttatttgaaggaatttaaaatgctttcaattaacttgattaaatattataaattaaagattgataatccgaaaagtgatggaaaatggagaagattttataaacatcattataaaaagttaagatcttatggatgggcaaataattacaaaaagaattatttatttatcaagactttcgttcgagatccaatccctagaacgccattataccttccaaatggaacttgtaaagattgttttggttcatgtgagagttgtgtgtacaaaaagatacccaatgctgcaaaattgactgttttcaaattgtatatggatggtgtggagttgaaaggagttccagaagaattagaacaattaaagaacagtaaactgttcagtatttatctgattttatgtttgataccgggtgatggttatagagctttgtgtcatggtcttgtctagaatggtgtatttttcataaatttgtaattttcaataaacatttaaaattctaatttagttaatgtttatgttcttattggattattacatataaggattctacgattatgatgtttttcacaactaaatgtttatttgcttgatcgtatctaaaatcttcattgaattgcatgaaatttacggtttttttaacgaactgtttactttattcatttataggatttaatttaaataaagttattatagaaaagacccaaattattatagatctaaaaaaagcaaaaattattctgtagtattcaaataccatttcatggtgtactttctaaaagtcttacctctccaatacattataataaaagagccactaatcacgaaacaaaagcatgctaacataatagtggttcccaaaacaccaactccatctaaccagtattggaaaacccaagtgaaaactgtagcaaataaatttctaacaaataacactgaagtcattgtatcatttggctgttttggataacattctaacacataagtcaacgataatgatgtgatactacataatccaattgaaatcaatccaataccaattgcaccaacaacccatgaagcaccatataatggacccaaaccgtacattaataatccaccaacatttaatactacgggaattgaaatcatcaataaacgaaattctggttcaaaaataccatcgtttcttttagtcatataaatttggaaagaatcagagaatgatgaatataaacctccaatgagtgtacctgcaaccattgctagatttaaaagacctaatgtatctggtgagaaattgtatggtggtgccataaaaaattgagcttgtgtgacagtaattaaagataaccaacaaatttgaataccataaacaactgatgcccataaaactgctggatatcttaaaacaattaatgttttaataatactgaatggagaaagtttgctatcattaaccgtaaatggatataatctttgtaaataagtttttggttcatctatttgttcaacagaatcaatcttgtcactatcactatatggtgcttcatttacaatcacttgagatttttcattggaaagtaataagttttgatcagtagtatttgtgtgactatgcattgttctatttgacttcacaacttggagtaacttttcatcaagttcaaaagtatcttcagcttttcttgtaaagtaagattcttcaaggaagaaaaattgaacaactaataaaccaaagcaaataataatagaaatatatccacaccacaaataacctaagtctgaggtaatataacctgctaaaaatggaccgaatgcggaacctaaacctaaagttaaagtgtaaattccaatgaacttaccatgatcgtgcaaaaagaaaatatcagcaattgaaacttcaaccattgaatcaataggaccaacagcaattccagccataacggagtatccaataaatccagaataagtggtgcgtgtaacaaaaataatgcaggcaataattataaataatgaagaaagtagataaattggtcttctaccaatcttgcaagaaactggttggcatagcaagcaactaaaggctaaaaatagaaaagtcaatcctttacctgtattcaacttgtttaaagatgcatcataaacctcggcaagcaaagtatagataggaccacaaaaatttgaacatgctgcaagaatcatggaaaaaaagaatagaataataaagtgtaacatttttcgaaagtaagaccaatttaatggatcatttggacttttagatggttgaggaatcaaaatgatatcggaatcttttttgttggaaattcctaaaccttcaatttcgtgttgttctccaaccaaaaccgtggttcctggaatggtaagatcatcttttaatgatttgtcttctgttagaaacattgtttttcttttttcttgattgtttgttttttgatttgtcagaaatacatgagaattaacacagttcaaaggtatttacaaagttgaaacagttgttgcttttaaataaacaaaatttttcaacagcagtagtgatgataaggaataaagatagctgctatcatatctttatctgataagataactaagtggagatagaaataaatcaatttaacgcttccgaactcaatgtgaaaaaaagtttaaattgaaagacgtttctttttttctattttgcgcagccgctactgataagaaaattgattttcccgattgggtctgataagggtctgataagggtctgataaggtctgataaggttatcttaagcgcttgcgttattctttcaattaggagctctgatataataatatttaaatgaacacagcaatctactaacagaaaaataacttgcatgtgtaaaggtaagtgtcaaaaaaataacagcaatccaatgacaattataattacaacagattgggaaactgcagctaaaaacaagaagaaagaggtttcatcaaacattcctcaagaatggctacttcctactgatttacttgaaaaatacaatgaaacaacatctgtttctgttttagatttgccaaaaaaactaatgtctgctgaagagtttaaaattacagaaagttacacagctctggaattgttggaaaagcttaagagttcaaaaatttcagctgttgaagttattgatgctttctctcatagagctgctattgctactcaagttacaaattgttgtactgaacttatgtttgaatatggtaaaaaaagagctgaatttttagataattatttaaaagaaaataataaaccatatggaccacttcatggtttaccaatctcattaaaggatagtttcaatattcctggttatgattccacgttgggatttgtttcaaaaattaacaacaaaccacaaaataagagtgacttggttaaacaattggaaaacttgggtgctgttttctatgtgaaaactaatattccacaaactttaatgactgctgactcggagaataacatttttggtagaactctaaacccaaataatttaacattgacagcaggtggtagcagtggtggtgaaggtgcattgattaagatgaggggttcaattttaggaattggtactgatattgcaggttctataagaatcccagcgttgtgtaatggtgtttatgggtacagaccaacttctaaaagatgggcaatgggtaatcaaatgactttatcaagagaagtctttgttgctgttgagccagttgcaggacctttggctgcagatttggaaacaattgcatttttaactgagattatttacaatgataaatcatggaggtatgactcaaacaatttgagaattgcttatcaggatccaaaaattaagtctggtgataaattatctgttggtattgttatggaagatcctgatttaccagttcatccaccaattaaaagaatcatcaaagaagttgctgatattttatcttcaaaaggacataccattgaatttgtcactgaatttccatcttatgacaaagcatgggaacttggatggtcgtctttccaaagcgacccaaattcaacagcaattgaaaatttaacatgtactggtgaaagatttattaaatcactttgcttaccaggaatggatgtatatggaaaaggtccaactgatattgatgaacttataaaacttaaaactgaaatcaacaactatatgaaagaatggacacagatttacaataaatatgatgttataatttctccaggctctccaggtactgcaccacctcatgatacatatggtattgcaccatataccaccatgttgaacattttaaattttcctagtgtcattattccatttggtaaggttgatccttctgttgataaaaccgatttaagtactgtttaccctgaaaaattgaaacatatttatgcacactattcgttagatacttacaaggaaggtcctggtcatattcaagtatcagcacctcatcttgaagatgaaaagcttcttgcatgttgctcaataattgatcaagctttgaaaaaatgacttttttatattgtctatcgtttttacttaatactttctaatttatctaaattttattttacttattttacttaaactatttaaatcaaatccatcagcttaaaaagatttgattaacaatcatttcattttctagcatctctaaacctctattttgattccatgctagttttaagttatctatagctcgcaaatctccgacattatgtgtaatttcccactttttctttaagtaactcaaaattttgtcttgatcaattttgttttccaaagttaaaccaatgataaatattccccataacttaaaaagtccattctccatatcggaatcgtccaaactattgaaaactgagaaaaataactccttcagctcatctttttcgatttggcttgcatatgggaaaacatctaaaagtaacattttacaacctatcagtgtgatgtagatcattttttggcttgatttaatttctttttccaacaaatcattaaccgccatcatcagtgttgagtaaaatccgttatcataagactttttcctaaataaaaatgaagttttagctataataggtaaaacatcgagtgtttcacctaataataagtttgactctgtagttgctttatctggaaaatatgatctcaaaatgtcacataaaataaacggatgatatttgtttaaaagttctaaaggtgttatgagtattgaaactgaataatgataaaataaactttcaattaacagtctaatagttcttgatgactcaatattatttttacttaaaataaattcaacccctgtgtaaatatccttcaacaactcttcattgtttgagctcatgtaaattttattcaaaatactaaaaatgatcgaatgtaatatccaatcaaatgaatcactcttattgtacgatttaagaacttgtgtcattgcctttttatgaacctcattaataaccgcatgtttggaaatgtcaacactaaaaagatatgcagctgataacgatgttaaaatatctctgaattcagaactttttcgtaaagtttctaatgttaattcagagatgacttgtagtgattcttttggaacgagggatttaatagttacattaaaaaatatgttaaaaagatgatcaaatggaacattatttaaaggctgtaatgctaaatattcacttattatcatcatttgactattgtttcttgaaacctctaaactttcttgctcttcttttgctaaattttgttgtattttattacatgttgcagttttgaaaacacattgtatttgtttgccaacacatctattgcattgtggcttattctcatcacatttcttctttgctttgctacaagcaatgcatccgtttctggatcttctttgagttttcaaagttacctgctccaaaatttcaaccccgttatcatttatgaattgatttacagtttgtttggcagtaccccaaatacattgaatatctttcttggaacataactgacatactggtttagtttcatcacactttttccttgataacctgcaagaaatacaccctgacttagttcttttgattttttcctgtgattttggcattgttgtggtatatatattcagctacatcatgagaagtgttaacgttaatattgataagttttgttaaaggttcgatgcttatctcaacccaatcacaaatttttttttgttattacgtaatcacgaattatctaacatgaattatcaatagttttccaattgattcaagaattctgaaccaagatttgctattttagtatatttagctgtgggtttgagaaaaaaagtatctgtaaatttatataatcctgagttacttaaatatgatattaaaactatcaaagaatatgttgcaggggagaagagcaataacttgagtcaaggaaaatatcagtgctattttaaaaagattaagtaataaatcatctttcataaattccatctagaacaaggatttaggtgctgaaaatcttaatataaagtttattgaaaaatatgatttatagagtggagacacagttttgaaaatatagaagtaactttttgcaattagtgattaagttctcaaagccatttgaagataaagcaaactgtgtcttattttgattttaaaatatagtaaaataaatattctttgttaagggttataaaaaatgtttataaaatattaaataaaatcaataagattctttatcttgttttgctctcaaatcataaacatttagggcttcttctgcagctttgacaccagataaaaccattgcaccaaaagttggtcccattctattagaagaatcacattcactcaattccataccagcaacaatcaaacctggaaaaacttctctagtattcttcacgattgaatcttcagctaaattcatgtctaaacaacccatttgatttcttttaatgtaaccttggctaactaatctcttgacacaaaaagcacccattggaccatcatgtcctgtacatgaaataattaatttggaattaatagtgtttggatccatacatgattgatcatcatgatgcattgaaactaaagtccaattagtaacaacaccagcaactctaataccaccttctgatgtttttctagtaatcaaatcttcaacacaagttgcattgaaaagtttaacatttggtaattctaaaacttttgaacataatttagtaatgaaaagtgcagcatgtttaacaacaataaaattaccttcatcttcataatcaatacctaattctttaataaaggtatcagctggttttcttaaaaccattgaggaaaataattgaccacctaaaaagcaacccccaccaacagcaacatttgcttcaacgatagcaatctttaaatctggtcttgattttgccaaaatatatgcagcagtcaaacctgaagatccggcaccaacaataacaatgtcagattcagcatatttatctaaatcagcaaagtatctttttgtcattgcacgggaaacttgtgattccctaattggagcaaatttgaaagagtcccaatcataaactgcatcagtggcagttgctacttttgattcatcattgaaaacatttgcagttttcatagtgattggagtttgcgtaattgttgttgtagtactcctttaaaaaaataataggtatatatatttttaatgttagtgatttgttctctatgttggaaagttttgaaaagtacatacattttgttttgtgttgttttgttttgttttatgaagtattagaagtattagttaaataccaaaaataatttaagatgaaagcatgcctatttataataaaagtatttagattttacttcttagctattttggcgaaagaatcaaaaggctggacagttttgaatttgaaaatgctacatttctatcaataaatccaaggtgtctagacacttacattattagtgcaattatggtttaatcaattaaggtaaaagagtggttattcagaaaaaggtataaaataaataaataaatacaccccggagaaagcaaagttcattttttctattgttaaaatgcgatgattaggagatgactcacccgttgagacatttttcaatcattttgcactcctacaactatatttactacaatataattagcataaatctaaactaatgataagttcactttaactttaactttttccttcttctttgttatcacttttcacaaaactccgaagtattaaaaatcactcaaatctcgtgatttaaagccacgccatttgtaagattttactatatacttctatttgtagtgaatagtgtaagaatttgtacgtagttttgccatatagctctaaattacgtatctgaattatgtagtgcaatacaatattttacaatttgacaaaaaaagcaccaaaaaaagcattgaaagaacatttgaaattgactcaattttacaatttgtggtgctgttataataatgattcaattaagatgaacccggacattgcaggttctcttattttcaaattgatagccacatgtacccgtgtctaaccgaaagagtcctcattgccacaaatcttttgaaatgttacatcttttcacaaaatagcttctttttgatctattttaaagtttactgaatgtttgctattgtttcgatggccaggagcaatccactagtatcactttaagaagagacatttgtcaccaaatatagagtgcctttcattgttctttttttttacttacaaattaacaacaagaatgacaaccgcaaagcaacaacaaaaatcaactgaaaagattacattttccttaaactggggaccagcaccttaccatattccaatttatcttgcccaaactcaaggttactttaaagaagaaggattggacattgctattttagaaccttccaatccatcagatgttaccgagttaattggctctggtaagattgacatgggattaaaagctatgattcatactttagctgctaaggcaagaggttatcctgttacttctgttggttcattacttgatgagccatttaccggggttttatacttaaagtcaagtggtattaccaacgattttgaaactatcaagggtaaaactattggttatgttggtgaatttggtaaaatccaattagatgaattatgtaaatatcatggtttaacaaagaatgattatactgcagttagatgtggtatgaatgttgctaaatatattttagaaggtaagattgatggtggtattggtattgaatgtatgcaacaagttgaattagaacaatattgtaaggcaaatggtcttgatgaaactgatgttcaaatgatgagaattgacaaagttgcttgtcttggttgttgctgtttttgttctatctgttacatttgtaacgatgaatttttatcaaagaatgaaagtaaggttaaggcatttttaagagctattaagaaagcaactgatgatgttatcaatgatccaaagggttcttggaataaatatgttgattttaaacctcaattagataacgaattatcttacaaacaatacgaaagatgttatgtttatttctctgcatctttatttaatgttcatagagattggaacaaggttactaactacggtaaaagacttgatattttaccagctgattacaagccaaactattcaaatgattacgttccaggtgttgaacctaaggaagttgatgatccacttgaagctcaaagattgatggcaattcatcaagaaaatgttagaaagaatggtggattttctagattataaatttagattatcaagattgttatttaattttataattagttattgtgtttaacctcatttttatcttcatcaattatatttcataaaaggactcacataaaagtaaaattgtttttgagaataaatcatttgaatcatatacagtacctcaaaatttattagaagtagtattgatgtctagcatagtaaacatgtggtgttttcgtagatacaagtggttaaaagctgttctagttaaatgtcttatattaattataaaagttaggtagctcaacttcttttagtagttgaagttcacctaataactacttagaccatctgcaatggtatttgtgttttgtaattacaggatgggtttggctggatattttaatagtttaacagtgggtcttcttttaaaagagtttctagttgttgagttagagtatttcaagttagatttttctgattaactttttagtagttgttatcaacttatacagtagatatatacttctagttagttggtttcttatagaaagagcactagagattataaatatcaaaatagaatgttcaaattgtttttattgatatcattattgaaagcttgtttttccccataataaattagtatgtcaatctgacaattttttgttgatttcctccttatcatttggttcttttatatgttgtttgtttaatcatttccaatatgtgaagccaggtttcattaaaaaatgtctcttattgaaaaagttatgacatttcaaagtttaattttcttcattttttgtaatttggtattcaatgttagaaacaatgattgtaacttcaaactaatttgctgttgtataatttgcatgttctgataagtaatatgtaaaccattttgttaaatattgaaaactgataagattattacacttttcatttttgtaaattagtatagcagctgtatcgacttatcaaccacgcacccgtttaactcagttaaaacactcgttggtttgtatatattttctgatcactatttattaaatgtcatttaaaaagaccttttattgataaagttatgccactttgtaattttaatttttgaaattttaaaattagttttttattacttgttctaatgattttaagtttgtgttaattagatttttgtattagtacattgcaatgattaagaataagtaagttatttagattaacgtttaaaactgatggacttatttcactttcaattttcaaaaattagtatgggaacgtgcaaaatgtcaacggcacatctttttgaccaagtttaagcacttatttatctattacctctttctgatagttgcgtattaagtttcgtttcaaaagacccagtaataatgaaattatggcaattcaaaaattaaaaatgtaaaattttctaattgactttttaatagttaaactaatgattttaaatccgtggtagttggatgtggtatcatttgcaagttctaatgaagatttgataaaccacttcaattgatattccaaactgatgaagttaagttgaagttctattttgaaatttagtatgacaattcagcaattaaatattataatattcagttttagcaacagttcatcatgtttagttaatgaagagtttctaatttcaatttagcaaattgaagttgatttgattaagaaatgatgtagttattaaaggttaaagttagcattgttaataaagtcattttgtatcttctttgtttctcaactttaagcttcaaactaagtcagggttgtcttatttgatgtttcttatggtataatgggtctacttgtcatcaatatatgtttattagtgtcagtttaatcaaactcaaaggaaaaagaagtgttggataaattgctaattaaattgcctacatgaattctcactataattttttctcatagtaattcttaccatagtaaaatattgttaaattggttctttcaagtaacaattatatgtgttatattaaagcttttaaacttgaacaaaatgctttcttacactacttgtattggtgaaaatgaatatgtaattagattgttgaaattaattgtttaaaaattagaattttaagtttatttcaccatagtaatttagtatgttaaatcaactttcttttctattaatggcttatttattgtaactataattttaaatcgttattctatatcacaaatggacctttagtgacgatatttgattttttaaaagtaatttcaaacttattacaaagtagtttatcaattgttaccttgtcattctctaaaatcactgtttttcactttttaggtggctcgtcattttataaatgttgctatatctccttcaatcaagctgtttttactattctttgacttggatattgatatttagtacaattagtatcctatatatgcttattatcatttaaatagccttcatgtaacaagatataaccaatagtagacaaaaccgctcaatatatgacataccccatgttgtctttatatcctcaccatagtaatttttcacatagtaaatttagtatggtaaattaacagttttaatggatgttatttaggggttatatacaggatatacagttctagctagtaagattattatacaatgtgtatttgagaattagaatatgtaattactttgttcatattatatgtttgaaagttcaaatcttcaactcacttcaataaatcaattaaattatcaatgtatttgtaatgacctgcaactgttctcgtttgtttatttagtcattactaacatgtagtagtaattattattaaaaaagaggttatattggtaaagttaggatgttttgaagttcaatttgtcacaattttctaattaactttttaatagttgtattaattattttaaaatcaggttagttagaagttttattagcacaatgtattgactgtattaaagcaaaccatttcaattgataattgaaactaattgaaaaaacttagttttaattttcaaaatttagtatgggaaatctatcatcatattaaccacacatttgtatgaatcaagtgaaacagatgtttgtttgtttgtaattaataataattgtccattgagttttatttagaaagacatggcattgatgtatttatatcactttataaactaatttttaagattttaaaattggctatctaatagttgttttaatgattttaaaatcagagtagttcgatgttgtattagtacgttgtaataattgcaaacacgtaaaccattttaactgatattcaaaagtgaatgaataaagtccttcttatttttcaaaaattagtatggcaatttagcaattaaattgttaaaggttcctttcggtattttaattatcaaggtttgtcatttaaaacattctgaattcacaaaagtaagttaagttaaaaaagaatgagaactgatgaagttagaactatttaaagttgacaacaaaatatgtcagttttctaactcctctgttttgcaacattaagcttcaaactaacttggaggttaattgttagcatttttttatagtgctatagatccatttgtcattagaacatgtcaattagtagtaaaattaggctgtacaattgatgaatctgtaaatattggatagttattcggtggtttaaatttcatagtaaatgatttactcacttcaattttagatatttactggaagttaaacaatcaattgtgaaacagtttaaaaaatatggtacaattattggtatgatatgcttttgtagtaatgatttaagcagataaatgttaatattttatcaattgatgcaatctataatataaataaaaaatcgaaactaatttcagtgaataagaataaaaatttaaacgatgcaatgtttaagtcaatatgctagatgaatttttgatgagtgaaccatgtgaattagttgatggaaaattagataataaatttccatgatggtcttatattaataactaataaattgaaccatgtaaagataaacaagtttaaagctttttgataaataataaaacctcacgataccagttgtacagttaataattttgactaatctattattccacgagactattgattatcatatgggtcatagatggtcatcctttcaattcgtccataaagaaagagttgtcaataaaacagttaattaaaatttattaagagaacttccctcacatagtaaatatttttcaacatgttaattgtcagagtgttcttcttagtggatattggttcttttattaacaactggttaaatacattcataattaagtgtaatgaagtgtgatcaataaaagtgatgttgctaatttaggcttctaaaaatattatttaaattgatgtaatattactcttattcattggaattaatatgatactatcaaatgaatatttgattaatccattgggagattaataacacaaatgtatcaacataaattttaatatcacagataaatgattattaaaaataaaaaatgaaaagtattcaagtatgaaacgaatgtattagctgtataatgtgaaattaaattatctaaatctcttattagtgtttatattgaagattatgttaattcatcaatgagttcaagccagataataaaacaatattggaatatattaataaattgagattcatctagtaaagtaatattgggacacacaattaaaatgatatataaaaaagacacattgattgtcgatggaatataagtgatgaaatgttttcatttgggtaaattatctggtgataagctgatcactaataataacaacatcgacaatgataatagtgatgatatccttaaaaaatttagtgtactaattttaccactatgcagtttttgttatatttactaaaaatgaatgctctttgtgttcaatactacatgattctatttttaaaaattcaagcttaaacattacttgaaattcagtagatttagtatctgttatttacattttagctattgattaatataacttaatatatccaactattaactcagatatggtaatattgagataaacaataacaacatccaataatactgaatattattattagaaagaatgatttacataatattatttttgttttaaaacaatacactgatacagttagtttgaggtttaacgtgaaggagtatttaaccaagtttctaaatgaattaaaactaatacaattaatagttaagttatgtaagtataaattataatactgtataattattcccatttataaatgtaataagttaccaactaaaacaatattcaatacattgaagtatatctgaagcactaacaactaataatagttcaatattaacaaacatcaatagtaatagtttattctttattctgtgtgagacaaaacattttgagaaaaccctcgctttttcggctaaacgtttattttttattttggatgacaatcacttttcgggtaattttggttttcggataatgttttgaattttttttttttaacttcttcgcatgagtgatgactatagccgaaatacatgttatacatatgacgattagccgaatattctatttcagttattaacatggcattttttaagtttcaatgtattcatcttattccatagtcatttatattaagatagatacagtgggggggtatagtgaagtagagtgaagtagatcgcaggggggtatagtgaagtaggtcgcaggggggggtatagtgaagtaggtcgcaggggggtatagtgaagtatgtcgcagggggggtatagtgaagtaggtcgcagggggggtatagtgaagtagtgaagtaggtcgcagggggggtatagtgaagtaggtcgcaggggggtatagtgaagtaggtcgcagggggggtatagtgaagtaggtcgcagggggggtatagtgaagtaggtcgcagggggggtatagtgaagtaggtcgcagggggggtatagtgaagtaggtcgcagggggggtatagtgaagtaggtcgcagggggggtatagtgaagtaggtcgcagggggggtatagtgaagtaggtcgcagggggggtcgcagggggggtatagtgaagtaggtcgcagggggggtatagtgaagtagtgaagtaggtcgcagggggggtatagtgaagtaggtcgcaggggggtatagtgaagtaggtcgcagggggggtatagtgaagtaggtcgcagggggggtatagtgaagtaggtcgcaggggggtatagtgaagtaggtcgcagggggggtatagtgaagtaggtcgcagggggggtatagtgaagtaggtcgcagggggggtatagtgaagtaggtcgcagggggggtcgcagggggggtatagtgaagtaggtcgcagggggggtatagtgaagtaggtcgcagggggggtatagtgaagtaggtcgcaggggggtatagtgaagtaggtcgcagggggggtatagtgaagtaggtcgcagggggggtatagtgaagtaggtcgcagggggggtatagtgaagtaggtcgcagggggggtatagtgaagtaggtcgcaggggggtatagtgaagtaggtcgcagggggggtatagtgaagtaggtcgcaggggggtatagtgaagtaggtcgcaggggggtatagtgaagtaggtcgcagggggggtatagtgaagtaggtcgcaggggggtatagtgaagtaggtcgcagggggggtatagtgaagtaggtcgcagggggggtatagtgaagtaggtcgcagggggggtatagtgaagtaggtcgcagggggggtatagtgaagtaggtcgcagggggggtatagtgaagtaggtcgcagggggggtatagtgaagtaggtcgcagggggggtatagtgaagtaggtcgcagggggggtatagtgaagtaggtcgcagggggggtatagtgaagtaggtcgcaggggggtatagtgaagtaggtcgcagggggggtatagtgaagtgaagtaggtcgcagggggggtatagtgaagtaggtcgcagggggggtatagtgaagtaggtcgcaggggggtatagtgaagtaggtcgcagggggggtatagtgaagtagggggggtatagtgaagtagttcgcagggggggtatagtgaagtaggtcgcagggggggtatagtgaagtaggtcgcagggggggtatagtgaagtaggtcgcagggggggtcgcagggggggtatagtgaagtaggtcgcagggggggtatagtgaagtaggtcgcaggggggtatagtgaagtaggtcgcaggggggtatagtgaagtaggtcgcaggg

SEQ ID NO: 4 - DNA, 37746 bp, Pichia kluyveri
  >Nicaragua_Y298_000012F_mitochondrion
tataatattattatatctttacatttttatttttattcctattttttttcatttaaatgatctttattcaatatacacatagttacatcttaaatttttcataactattacgttttttagataataatttatacttattaaaataatcaaatattattatattttttaatcctaatatatgcatttcaaatacatcattacttaaattattaactactacagaacctacttttgatcctttatttaaactattaaataattctaatatataatctaaaacatatttatttatatttccttttgtgctaatatatattttaatctatatgttgatgtattttttaatgctgtaaaacatcctactgcatctgtaaatcctgataatcaaccatcttctaatgatggtaattttaatttattttgtataaatattatatcttcattattttttaataatgattcatttaattttgataaaaatattacaaattttaataccttgtaggtatcactaaatttccatttaataataaacataataaatatatatctctttttttatatacatctcaactatatgtttgacttttatttgattctttatttattgctcccatacataaagtattttttattaattctaatacctcaggctgttcctgcttatctttaaatgattgagtaatacatatctttatatctcctcttttagctattataaattttccacctccttcaaaatttcctataaatcattctaaaaattctctacttggtaatttattattcggttttaattctttaaatttttcattaaatatatctaaatctcttatagttctttctaatcttatatttcttatattctctatgtcttttatatcttttttatcatttattttactatttatttttaaaatgtatatcaataataatatattcattatattttctactcctaagaataaatgttggtatagcactgggtctcccctcctgctgattcatagaatgatgtattaaagtttctatccattaataataatgttataccctttatcttgattaacgatctttcaatcataattaccctatatatatttatataaattaatatttatactttatattatatatataaaataatttatatataaaaaaattatatatgttaatactcaactactcacgtaattgttgggactatatcttatttattaataagtataaaaattttttaaatgatctcaattaaaataagttctactatcattaatattctctcttactcattttattatttttatatttgaaggtgtatgatttaatcttggagtatataaattataaactaaacttcaatctttataatctaaatactttgaactaaataaaggataattacttagataatttactaatatactattacttttataatttgtagttctaatattatattctgaacttctttttacttttttatcacgttctactaactttacctttatatttaaagctttacctattatctccattatttctttattatcatctcctcaattatttaatttcgcttgactaaatctcatataaacactagtattataatcacttgtatcttttatttttctatgtgctacataaaattactatctgcttctaatatacctgataatcaagcattacttaatatatctgatctatctacctctttttttattattttctgtagtaataattttccattttttaataatatataattatctagatctatattatttaatcaatctattaataatcataatcttttatttttattagttcttaattttccatttattaaatttactacctttattatccctacataagtatttattatataaacataagtatttgttcctttcttgcttactataaatcctactcctaattcattcataattgaataagctaatggataatctttatttttaaatactatttgaattgatggataatttaatactttttttttttgaacgaatactcgttggtattattattgatccattcccttctattaatcctgctaaaataatatcctaattgatttgatgataatttctctttatctatttcatttaatatttctaaatctttttctcctataaattttgaattctcttctaattcgactcccttatttattaagatcatttcttttttatactctttttctttttttaagaaaaaacaaataaactcatacgtatagtctctgaggatctccaataaattctttattgttaataaatttattcatttattaatacaaacttgcaaagtttgtagatttcctgctgattgtcttaattcttttattattaatttctttattaatactaaatatattaagagtttccagcatatagtatgatttcaatcagccagtatttttttaaggttagctgataatacaggcaatgtcattactaataatattgctgtaaataatactgatcatacaaataatggtaatttactcattgtcattcctaatgttctcatattaaatattgtagttataaaggtttatagctcctaataatgatgatattgatgttaggtgtaatgagaatatggctaaatctacactaggcccactatgtgattgtattgctgataatggtggatatactgttcatcctgttcctggtccattttctattaaagcactagctactaaacaaactaaagctggtggtaataatcagaaacttatattgtttaaacgtgcaaatgacatatcacttgccccgatcattaatggaactaaataattctttttgttttattatttctaataaatttggactatctcttaatctatttttatttagattcatcacgtatagtctctgaggatcctactcatatattatctttcatatatactttggtttcctgctgattgtccattgttacatctttacttattttttatcattaaatcttatattatataaaccatatatattatatatattatacatattatttaatattaaataaagctttaggagtttccagcatatagtgatgtcataattatatatttcacaacatataacggcaattattatttataataatttaagaattgtaataattattatttaaatgatcaaaagttgcaaaaactctagtactattaaaatttctttttatttctttactcctatctaatattaaagcatctgtaaatgaattcttactatctattaaatttaatatactttctcaatctttataatctaaatattttgatgataataatggatatgtattaaaatactcttttactttaataaatttaatttactattcactgatattatatatgatctacgtatttttttatactctttttctaccccacacaaagtgtgggcggatacttcattctttaattttaaatctctctctctactatatacttttgaattaaacaatttcgctattttcatcattatttcactataactattattttcatcattaattatattatttataatataatcttgtctaatctctaatatataacttaaatttactctagatttatgtcttttactatttttcaataattctatttcaaaattcccgtctgcatctgtaaatcctgataatcatccatttgtatttatttctgatttatctatatctaaaactggtaaataatttatattttcaagtattgattctatctttttttattcagtaattctaaactattactctcatttaattccccctgccccacactatgtgttagaatgggtgggtactttattttatttattgttatataattatttattcaatttatagctcttactaatgcttcatatttaggtgttctaaaataaccatttattatatttattagtatataaacatcttctatttttgatattcttcataatacatatttatgttctgaagataattcttttatttttcctatttttaataaattatataaatatttagctaattctaaatctttttattaaacactatctctataattggactatttttaatttttttatttcatttgatactactatcgttccatccccttctattaatcctgctaaatatggacctcatttgtctaccctacacgaagtacgggcggggattttatttttataataattattactatctatcattatcattctttttatttctttaccaaagaatcccattgttactggcattattaaaaagaataccattaacacggcgtgcgctgtcacgattacattaaataattgatggtttcccattaataattggtttcctggtgctgctaattctaatcttaatactaatgacataaatgatcccaatattccacagaataatgagaatataaagtataatactgctatatctttagcatttgtactaaataatcatctatttacataatctccaaatcttaattggttctgcatttttatgcatttctttttattatatataattcttattacttatcttattccattaatatctccttatatatattattttactttaactaactatctcacattcttttcctctttttttatactaattaatatctttttaccctttatattttataaatatattatattattatatatatattaaatatatatatatatatatatatattttatttattttttatttatattttttatatagttatatacatcaaattttgatgatctacttgaagtatttattaatctaactaatgatattgcatttgaacctaattcataaacaaaaccaacaactaatattaataagaataatataaagaatattaatccgaaattacctactatataactagatattatataaggtaacattgaagatacttctaaatcaaaaggtaagaataataaagctattaatataaatgggataggtactgggttattactttgtttaaaactatcaaatccacattcaaaaggattacttttttctatataatcagtactattacctacattttcatccattttactactttctactaataaatagttaactattattaatattaaacctaataatcctactactattaaaaatcaattaaagatatcttgaaacatattaaatcatatttaaagttactataaatgttcctcttattatgttattatattcaaatagtattaataatattactaatgtcattaaacttatttgataacttatattattattcattaataataaattatttccatctttacttattactttatcttttaatgttatatatacattttccattttacttaataatgattcattatatactgatacatctttatagttatataaattataattatttaatatatcaaaacataattcttttattacactaccataataataagctgatattgaacttgctattactaataatattgataagaatatatatccattacctaatgcacttataaatactaataattttccatagaatccacttagaggtggtattcctattaatgagaagaatgatatacataaagctatacataaataactatttttatttaataatactctaaattgacttatatattctattggtgagtatttacttaacattacatcatattttcctacttcacctttactttctccttttaatatatttatatgactatatattggtaataataatattatactaaatgtatttatatgagttattgaatattgtaatatatagaataaatatcctatatatgagtatccattacttgctattattgctaataacatataacttacatttaataaactactataagctaataatgtttttattcttattacatttactccacctattgatcctattatcattgatattaatattataaagcttattatatttattatattactactactttctgtttctactaaatttactatacttactaaacttaatattaatgttaatatacttaattttggtaataaacttatataatatgttactattgttggtgctaatgtatatattactattgaataactataaaatggagctaatcctacttttataaataatcctaataatattattaatatatcatatatatttatattatttatacataatgatattaattctatatttgttaatcctatttcttcatatattgatactgtaccatctaatattataaatgatcctatactacctactataaagtaatataatccactttttacactattacttgatgtattatatgctgatgttattaaatataatgaatatgattgtaattctattactataaataataccattaaatcatttactaatattaataatattaatcctaatatattaaataatattaataatcctaatgattcttttacttgtattatatgatctaatacttttattgttgttatattacatgataataataacatatatattatccctactaataatattaaattcatcatataatttgataaactatctatatataataaactattatataatgagttccctaatactaacatctctgttgtatttatatttatatttattaataatacatttactaaacttaataaacatactctttttaatcattttttacattcgttgtttttttctattatacttgttaatactacaaatattattattgttattgctaacattttattttttatttttttttcaccccactttacccgtatatttttacatataccatcctctgatatatatatatatatatatttatatatatttatatatttatttatttataattataaatgatattataattatttatattatattatattatatttaagatatattatattataattatttatttattctacctaaatagaataatacattttctaatgttgatattgctggaactattattaagaaataagcaaagtagaaagctgtacaatttacacctaattgtataaatggtacttctacatgtaattgtcctaagtttcctaataatataaagttaaatacaaataatcagaagaagaatttagatattggtttaaatgctaatcctctatataaacttctatctgttattggtaatattaataatattaataatgctccaaacattgctaatactccacctagtttatctggtattgaacgtaatattgcatagaatggtaataaatatcattcaggtacgatcgaggctggtgtaaccaatggattaccggggatataattatctggatgtcctaatgtattaggtgagaagaatacaaagaaacagaataatattaagaatacaaatactgttattgcatctttaaatataaagtatgggtgcatacttaatctatccatatttcctgttatacctattgggtttgatgatccatgtacatgtaaagctattaaatgtaatactactaatgctgctaatacaaatggtaataagtaatgtaatgcaaagaatctttgtattgttgggttacttactgagaatcctcctcatatgacttaaaaataacattttatattcattttattaatatttattatttatttctaaataaattagactatgtcatcaacctatatatatttatatctatagtatagtatagtatagtataggttggagagctctcttggaaagattattgttatattactcactttctagtcgttgaacgtttattttccttttttatacatatagaaaatacttcgctgcaagttatcatagtatatatattaaatataccttagagttccttgacaattcactctctttttcaataaatcttacgatttaaagccgctcattctttttttttgtttttatattatatattatataatattatgttattaaaaaaaggattaactaaattaacggtactatatcagctcctataaatggtatagctgataataagttagttataactgtagctcctcaatgtgacatttgtccataaactaaacaatatcccataaatcctgttgccattgttgctattaatattattactcctactattcatactaatactcttggtttacggtatgatccataatataatgctttacctacatgtatatacatacatccaaagaagaatgatgcaccatttgcatgtatatatcttattaatcatcctaaatttacatctctcattatatgttctactgaatcaaatgctaattctatatgtgatgaataatgcattgctaagaatattcctgaagctatttgtattactaaacataatcctaataaacttcctaaattatatcaataatttaatgaacttggttgaggtgaatctattaaatagctatttgctaaacttatatatggttggctttttctataagctatcatattttttttctttttctctttttatactcttataaattttttcttattttatctttattacattacataacataacataacataacatcttttttttttctctctttttttctttactatctttatagtaggttagtttttctctttttttttacaggtctaaaaagacttgaactctcaaaaatagctttgaaggctactgttttaccattaaactatagacctttatttttatttttatttttatatatatatatatttatatatatttattatgaataatatgataattttagttaatttttaccacccaccgctgattcctcaacgataactgtatttcaacttctcactagtcattttctaactgagtatatgataccttataatatttccaattttatagattaaatattatatatattatatttttaatatttagataaacttcaagcgaatgatgagtaattagtacgaaacagaaaggaagttcaccataacttaatgaattatgattactagcaattcctttttcataatctcgaatttcagagattaatccacattatatacacctctataagtatatttgatattccattttcttttctttatttattttttttatatcttttctttttctttatcaattttgtattgcgtctttagcccactatattaaagtcatcaggatttgttgtagttccttttattatgtatttttttaattaaattcattattatctatattcttttttatagattcggattttcgtctgtttatgaagttaatcataaccttaaagcacagactttaaacaacgatgtaacatttgtcatcatatatttttttatatgagattcaaataatggtaagattttcggggattatcgaattaaaaaacacaatccactgcctacaactgtaaccgtctattgtcttggatttcaactttgaagctatactctcctggcggaatacttttgctttcgcttttatttttcaataagtattcatcgtttactgcatgaactactcgggtatctaatccgttttgctactcatgccttcatccctcaatgtcagttaaatttttaattttatcttcacgtttatttgtctaattattttccacacatttcatctctcaatataatttttcataattattctatttaactctaatatattttttaatatatcattctacggatcctttaagccattaatgattaacgttcgcctccttagtttagccgcaactgctggcactaattttggttaagacttctatatatattctcatcttttttcttctatatatatattgattttatattcttcattattattttctttttactttttttttataatcttcatctttctaagtaactagatcaatctttcgatcattgtctaatattccttactgctgtattatatgcaatttatttctaaattacatcttttatattgaccttattcaagatcaatgtggtcattataactttcattattgactatggatctatggctaggttaatctctctattttatcctactacctattccacatattaactggactatcatcaaatctcttctttatttatgcccccccaaaggaagacacctttcatatatatttcatatatcacaatagttcacattttaatattttactcacctttacacaactttattaacatattttatacattaattgagtcttattcgcatgtattatgtccttagataacgcttaatctgagccgacatcatactcttttctttattaaattctttttctttttttattattatatacttttttaacatatatatattatatatatttatatttattataggaactaatggagttgaaccattaacttaagagtgtaaatctgatgttataccatttaactaaattccttttcttttagctcctttaacgagtcgaacgttaattatattattagaagtaatatgttttaaccaattaaactaaaagagcccagcccagcctatcaattatacaacctaacctccttttatactatattatactataatatattatactttcagataggctagaatcgaactaactaattcctctacccaaaaaaggcacctaaccattcggtctctatctgtttcttatatacatatatacttattaacttccatttcgtttcttatctacattctctctatttttcccttccttctcttttatttatttttatgattttccattattatatatatctatattattatatatttcttattctctttcttatttaaatatttattttatttctttacccttttatttttatttttattaattattaggtattttatatatatatatatatatatatatatttatttatatttatatatgattatatttatttatatttatatatggttatatttatataatataaaatataagatatattgattaattaattgattgatttataatatatttacttttaatgttatacctagtttaccattattagttgatttatccatataatttatgatattactattttttatataatttaatcttaatctatctttagagtaaccattattatttgaagtttcatcaaagatattatagatatataaattattatttttaaatgaacctttagtcattaagattctattagatctatttttaccttttctagcacctactttaccttttaataataaagatcaacctactatatttttatataatatttcattatttaaagttaaattattatccatatctaaatgattataataatcttttatatcattattaatataagagatattattatttgatttatttaattcatttaataataataattctttttttatattattttctacatttaatatattattatttaaagacatattttttaataaattatttgctattttattttttaatacacctttatcatttaatagtggtattctattttttaatctaaatctaaatatacgtgataatgttctttgtctttttgatattccttttcttattaattttaataatatttctggattattaaattcatattttaaatttataccttttatttctacttcttttaatccaaagtatttacttattatcatttttatattatttgatgtacctttatttattattttacctaataatatatctacataacttactatatatccatttacatttaatttagaattatttatttttaatatgtttctattactttttctttctgcacctggtgtgggagcggagactttatttaataatatatcattttttaataaataattatttattaaatcttttctttctaataatagttcattttttgaatgtatattacttattccacatattaatttatttgtatctaatactttattgtatatatttaatatatttgtatcattatttctttttaatattcttaataattgactttctcttttcatttcttttaattcattactttttatttcattttctattaattttgatacatttcataatgttttatttatcattacttcttttggtaagtttcctacttcttctatatttttttttaataattcttttaataataacattcattttttattttctttctcatttatacttaaattatttattatattttttacattagtatttatatattttacattatttctatttgacattatattatttattatatttgatactatctctttttcttgtaatatatatgatccttttttataatctttatttaataatactaattctttataatcttttattttatttataaacatatttattctacttatatttttatatgatttattatttggtaaaaaataataaaataatacttctactttatttaatttctcttttattactggtttacttattattatacttccaccactttttgatactctttctccatctttttttaaatctactccatttattatattttctaataatcttattattaatttacttattatactttttaatatcattccattcttattataattataacttattaatttataatcatttatatgatttaatttctctaatttatttattcttaataataatctttttcttaatattatctctttatttattctttttgatatacttctatttattaattctaatcagttctttatctccatttttaataatccttttgataatccttcccttatatttctttttaatatatatttcattactttatttatcatttcttttttctttttttttatactttctcttatacccattgatataattctaattttttacagattgttctttattaatagaaagactcgaacttaacatttattgcatatgaggcaatcgttttaaccaattaaactatattaatttctttactaaacatcccttttctgctcccccatctggggactgactaactgactgactaactttttgggtaaatactgagacttgaactcagatcacatacgccacaagtattcattctaacctattaaattatatttaccattctcttctcttttttataaagctacttcccttagttaggaaaaaccggacttgaaccgaatataaattgattaaaagtcaaacgttttaccatttaaactactttcccttctctttttcacttcattgaatcgaatagattcgaactattattagcttgccccaaatgcaagtgacttacctattagtctacgactcattctctctttttttgtcattgataagacttgaacttatacgcttttaaaagcaatacattttaagtgtattgtgactaccaattccaccacaatgacttcctataaataaatttataaataaattaatatttagttcccctatgcttagatgagaatcgaactcactttagttaatttgcaattaacttgttgaccttcaacactaaacattaactctttatattatatatatatatattattatataaaattattataaatactctatttttataaagttattttcccctatatattaattaataaataaataaagaaccacctttatatactacattatactatacattaatattctatatatatatatatatatatatttatttatatttatatttatatttatatttatattatctttaattttttattatattactattgaatatattaaagcatttgaagataagtataatatattacttataaagttaggtactatacctaatactaatgtaggtaaagctaagaagaataatataaagtgttctctatataataaatcataagttacagataagtatttagagaatgtacctgaagttaatttattagttaatttcatttggtaacatgctgataataatactgatgatgctgctaaaactcctattactggataattagttattgctcctgttatacataagaattctcctataaagttataacttaatggtgtacctgtattactaaaactaaagaatactaagtatactgcaaataatggcataaattgagttaatccttgataatagaataataccctattatgatatctatcatataatactcctcccattaatataaataaagctggtgatacaaatccatgagctaaacataatactaatgatcctattattcctaataaattatttgcaaatattcctaatatacatactcctaaatgacttattgaactataagctattattacttttaaatctgtttgacttaatgttactaaactactatatattattgttattattcctattacatataatattggtgcatataataatgatatttctgatatatttgataataatattcttattattccatatattgctaattttaatattattcctgctaataatattgatccccctaatggtgattctgagtgtactgttggtaatcatgtatgtactggtactaatggtgtttttactcctaatcctatcattaatcctattaataatacactttgtaattctattgatattattttactatttattgttacataatctacattattgtatactacatatattaatactattgataataacataaataatgaactacataatgtatatattaatacataataagctgctttatttttttttgatcctccatatattcctataattaaatataatggtattaatgtactttcaaataatacatagaaacttattaaatctaaacatacaaaatttaatcccattaatattactaataacattaataatatcatatatgttccacgtttttctgttatattttctcaatttgatattatacttattactcctaaatatattgttaatattaagaatattaatcctattccatcatatccaaaatctatatttaatacatttactactcttaaatatccataatcatttatatttatactatttaattcatttattactatatataaacttgctatacataatattaatatacttttacttatcatatttttatttccttttattgataatattctattctttgttaatcctattatccctgataatcctacaaaatttattcacattaaatttaacattcctttttctttctctatttatcatatatcttcttttatatatatcataaactaaactaacttttctttccccctttctctttctctcttcttttatatcctatcggagttgaaccaatatatttaaatccgtagtttaatattttaccattaaattaaggatacctaccttatcggaaattgtaggaatcgaacccacacagaatctcttcaattatatagcaaataacacatcttaccaatgattaaatttccttctcgattctgacctgactcgaacaggcaaccctcattgtgacaaaatgatacttaaaccaattaagctacagaaccttatacctatatccttagtggagttatcaggaatcgaacccaaatatattgcttgcaaagcaatcgttctaccaattaaactataaccccctatattatatattatattattatataattattatttatatttatatttatatataattttatatataaatatatttttatatattttttttaattaataatcaattaatcaattatactatatttaactatatttaactatatatttattatatatatatttatatacatactactactaattactaactaactaactaattactaactaactactaactaattaactaattcatttatattatatatatatatatatatatatatttatatacatatattatattatattatattatatatattatatatttattaaactattaatgataatccatttcctgcaaataataaacaaggaataaatatacataaagcgaataataaaggtaataatacatatcaacagaataagattaataaatcgaatcttaatctagggaatgaagctcttactcatatataagtaaataagaagaaattagttttcattataaataatgcactaaatattaatccttctataaatcagtataaattattttgaggtaatacatccataaataatatactattgatatctaaaggtcatgataaataacctccaaagaagaatgttactgttaatactgacattaataccattgatgtatattcacttaagaagaatataacaaatggtgatgctgataattctgtcatatgtcctgatactaactctgattctgcttctatattatcaaatggtggtctagctgtttctgctaatgctgctataaagtatattatacataatggtaataatggtactatattatttatatatacttggttttctattactaattctatatttaatgagtttactaataatactattataaatactattgttgttaatattaattcataacttattaattgagctgttgtacgaactgatgctaatattgtatatttactatttgacattcatcctactattactgtacctaatactcctaatgatcctgatcctaataagaatattaatgaatattctccttctattattcctaatcctgtatttaatggtactactccaaaacttattaatactgcatataatgttattaatggtcctcctatcatatatatatattccccattatgtactaatactatctcttttactaataattttaatgcatcagctattgccattaataccccatagtatcctaccgcatttggtcctaatcttctttgcatataagccatcgtttttctttcagctactgttaaataggctactcctaataataatcctactataaatattatcgccattaataaatattctattgattctaagatctctattattgtatatatcatcttcttttttcctttttcttttttaatttctttttcttattattatttatgaataaattatattatattcatatcttttttaataataaatacttcttttatcccttataatattctctttttcatttaatattattttttctttacttcatttttttttattatatatttatattatatttatattaaatattttattatttttcatttttttctgattttattactactattattcctattattcctaataataatattaaagctattaatattaagataaatgaatattctgtaaatattaaactacctattgttgttaaatctgaattattatgtatatttaataaattaaagttttcatatatatttacactatttatatcacaatcatttgaatcattataatctaaatcatctaaaaataatattaataatattacaaataaactactatattgaggttcatattcttcttttttatttaatactgatagtataaatacaaataatactactaccgctcctacatatattaatgtatataatataccaaataattgtgaactattaaatcataattctgttattactggtattattgtccctactaatatccctaatgattcaaatgatgttgtacttattaggatataataccctattaatgttacatctaatatattaaaatctataaacattttctcttctctttttttcttttttaattatattttataaataatattttatttcttattatctatattaattatctcgatttatatatatattaattatatatatataatttttttatataaatatatatatatatttatactttctttttgaatatatatgtgaacttttttttctagtttagtttgggtaatttcatcttaacttaccttctctattctttttttgagaagagtgtgaattgaacacacgaggataaatatcactgagtttacagttcagcttcaactaccaacattgaagatcttccccatatatattcttcggattaagtaggacttgaacccacactactataaagtaataatatttcaaatattacgcaataaccaaattctgccatcaatcctatagtctaaatcaggacttgaacctaaatcaaatatattaacagtataccgctttaccaattaagctattcagacaatctttatattatattatattatgattaattggacttgaaccaataattatttaggcctaaactaaacacgtctacctatttcgtcataatcatctctttttttattatattattatataaatatatctataattatatatttctttttttatctatctatctatatatatatatatatatatttatttttttatttttattcaaaagtaagtaatacataagattatttttttaaatatttatttaagactaataatacttcatttaagttcaataattcattattagttattgaatcttttatttttatataaagttttttacattcaggtatatcctttaagtatttacagattactacacctaatatgaaatttactaaatttagttccattttagtatacatatttgtacttaataacattggtattattttataatataatatatcttcattatctattaataaactacttcatacatttttttttgatctttttaatgatactttttgatctcctaaatctatatcttttactatatataaaggatctttataattttttataaattctaggataccatctagtattaaatcattatcagtactttttaattcaaaagagtttatatatttattcgcattttgtttttgtaattttaataatccttttgcttctataaatcctaataaataatttattgttaaattcttatttatataatttaatcctttctctcttgtttccctatcttctaatattatattttctgatcatatttccattcctttatttactcaagcttcaccatgtaattcttctttagttatatctaaataattcaataactctttaaacttaatataatccttagatttcttttctgatataaatccattatttccatctattattcccattatcttattcaattcttcctttgaacggatatctattacagctatagatctatctattctattatgaactttcttattctctaagaatattttttttattattaagtttaaatatctctcatttttatttgataactctattgttatatgtggtactattctataatatccttttttatgacctactcttttccctgtctttatatatccatctccatctataaatcctactaaatgactattaaattcattatcctttaggtcctttgtattatagtcaaaactatttaaattattttctctacagtattcatacttaattaatttagctaataattcttcttttattaatgaagtcatttccattgaatctacaaaactctctacattcattaataaaactttgttaaaatttttattttcacacatcttatatttctctttattactctcgctcctattaattatacctatgttatataattttccatttctacttatcttatctttattattatatactttttttttatttatatacatactaatttttattttgtatctactcaactgttgctaattagtttttattaaaaaatattaagatactttatatatatacatctagcttttaaatagtgggggggatatatttaatcgagtgcctaaaaatgtagtgttatgaaaggatgtctcttattggtttgagtctacttttaggtacgagacgggtagtgcttttttcatattacttatcttatcgtatttatttgttatttggatcttttagtagatgtcctttattaaacaagtaggctattaaaaattgctgtttatttattcaatatatacatttgtattgtccgttagtgcattgtattctatattataaatattatagtgtgatatttaatttaagatataaattatatctaaagtttttaatatttgttactcaattaatatcgtttcgttcgaagtatacagggaggtattggttgtatgagtagattaatgatgtatacttaaatatattaataaattatatatttttagaaatccatgttgtgtaaatgaaagtttcagaatcattccgcctatagaactctgaaatcgtatatgaataattcaataagaggacccatacaccgggaaaataataaaataaaatgaaaaataataatatgaataataaaataaatgatatgattgttaataatctttataaaaataataataaatatctctatgataatagagtttgagaaaaatatagaaatagcttggatattaaattagaatttgatattcttagtaatgactataaaggattaatagaagatatgttaagtttaaaattagatgataatattgataaattagatatgaaattatatagaactttagataaaaattataaatgtatgattagtaataaaaataatgaattattgtctgtattagaatatagattttataaaccttttggtaaagaaaaattaaaaagagaatacataaataatatgataggttcttttgatattgaaacaactagtggttttgatcatgaaagaattataggagtatcatgaattatgaaacctttagaaatgttacaagagttatctgtaaatgataatttaaaaattaatacaacccttataacagatgtaacgaatgcggatatatatgatgaaagttgtatatatcaaggttataatatgttgattgaatgtttaaaagatatgtgtgttaaagctaataattatacattctattgtcataacttaagtggatttgattcggtatatattataagtgctttaattaaatatactagagtaaaaggttcagaatctgatattacatttaaaattattagaagggaagctaaagtattaaaaataactgttaggtatatagatgaatctggtaaagaatctcaaatagttatattagatagtttactagtattgaatgcttctttaagaaaactatcacaattattttaattggaacatcaaaaaggttatttaccatatgattgagtatctactaatcttaattatataggtcctattcctcaatcgtttaatgatgatgttaaagcttatttattagaattatttcctaatggtataatgaatactaaaatagctcttaaaacttatctagatactgatgtaagattatttctaataattatggataaatttaaaaatattatatacagtactgctagagttgatttaactaaatgtataactatctctaaattagctttatctatatatagtaatatgtgtcatgatgaaactaaaaaaataccattaatatcctctactatagatgatactttcatacgtaaagctttatttggtggttataataacgttattaaccctatagctgatgaagcttattactatgatgttaattcattttaccctgctgtagctgttaaatatcgttaccctactacaaaaggatttgatatatcttatcctgaaggtttagattataaagattttaattatcctgaaactctaggagtattacactgtaaagtagaaacacctaaatatttagtaactggagtattacctgttaaagatattaataaaggtgttatatttcctttaggtcatttcttaggtattttaactaccgttgaattagattatgcattatctttaggatataaaattactgtatgtcaagggatgatctttaattcaatggaatcgccttataaaaaagtatatagatttcttttatagtagaaaatcaaatgctaagggtatttatagaacattatatatattccattatttatatatatatatatatatatatttatttattataaatatttatttaatattaataatatctcatttaaatctaataatttttcagtattggtattgattgattcttttatttttaaatataattctctacattcaggtatattttttaaatctttacagattactacacctaatatgaaatatactaaatttatttgcattttagtatacatatttgtacttaataacattggtattattttataatataagtattcattatttgttatacttatacgacttaattgattttttcttgatttacctttatcatatactatcccttttgattctaattctatattctcttttactaatgatttatcatttaaattatttatataatttaatatcccatgtagtattaaatcattctctgtattttgagttatttcaaaagatattcatatattattctttgtattattatgatgtaacactaatgatccttctgcttctataaatcccattattttatttatatttatattcttatttatataatctaactctttttcttttgtctctctattctctaattctaattcttttgatcatatctccattcctttatttaatcatatttcatcatgtgatatcccatattgagtagtatttacataattcactaattctttaaaattttcataagttcttgatcttttttgagataaaaatccattattttcatctattatatccattattaattttacatcctcttttgaactcatacttaatgttaatgtattttcaccaccattagcatatgtttttttttttgaaaatggaaatacttcacggattattagatttaaatacatatagtcttttgctattatttttataattatattagggactatacggtatattccttttctaggacctaatctttttcctgtcttcatacaaccatccccatctataaatcctactaaatgactattaaagtcttttttatttatatcttctaagatataatcataactgtttaatttattttctctacagtattcatatctcattaacactaaagttaatctatcttttattaaaggagtcatatttaatttacttacgaatgtatttatttctgcccggcacgcagttccggcgggaacttttattaattttatattatttgtcatttctttttcttttttttttatactttctcttatacccattgatataattctacttttttacagattgttctattattaatagtaagactcgaacttacttttattatcttattagattatcgttttaaccaattaaactatactaacttctttacttatctatattcaatctatattctttatattatctattttattcttttattaatagtaagattcgaacttacttttattatattcttatataatagttttaccaattaaactatattaactcctttacttctttttattaaaatattcttattatatatttttatatctctatataatatatattaaaattttcttattatatatatatatttttatatctctttatatttattttatataaatatatatatatatatttatatatatttatttatttattaaaccttagatttaattaaactccgtataataataagaatgatatcattaaacagaataatcctgtagcttcagacaaggcaaatcctaatatggcaaatgggaataatgtgtttcttaatcctgggtttcttgatgttccgtttattaatgcggcgaatactattgctattcctattccggctcctgttaatcctattgttgctattccagctcctatatattttcctgctaatactaattgcattatacaaatttttattttactaattaatactttttaattaattttttcgtcatttttttaccctttttaatgtttccaaaaagatttgaacttttatcaataaagcttcaatttattgctttaaccaggttaagctatagaaacatacttaagtccaagatgacttgaacatctaaatcttccttatcaaggaaacattttaacctattaaattatggacttatatatatatatatttatatttacatatatactataattttactattatatttcttattatacttatttttaatatataaggtaatattattgatgatactaataataatattataaataatcctatatatccataaaataatgtatttaagaagaaaaatggtactaattgtggcattttttcttttatttcttgtttttgttatttattctattttatttaatactatttatataaatattttttctttatctatattattatataatttcattatactttactttactttatatatatatatatatatatatatatattttttatatatttaattatttttaattaacaattatttatttataattatatttaaataaatacaaatactattacagctattattatgtataagtaagtataagtattaaagaatataaatacaaatatactaaagaatattaattctaatattaaacctaagttaaagaaaactaatttatttattgcattagatattcttaaatttaaagctgataatccataaggacctaagaagattaaaactcctttatctacataagtatttaataaatatgagatatataatcatgatctgaaaccataattatttaatatttgatcataatataatttttgattaaagaaattatatatattcattataaatgtattattataaataaataatttatcataaaataattcatacattactaataatattgttgaaaatactattgatgttattaaaggtaataattttattaatgaacttaaactaaattctgtatctactattattaaattatttggatgtataaatatactgttatatattgttgcacctaatcctaaatataaatctttcgctaaatatcctacaaatatactaaataatgctaatattatcattggtatatacataaatattggattctcatttaaatgcatatatacatatcttggattatttggtgtatttaagaatacataatatactaaccttactgaatatactgatgttaatgtcgctgatgctatcgcaaatcaatatattatatatcctgtaaatgtatatgatccatataatgattctattattatatcttttgaataatatcctgttaatcctggtaatgccattaatgataatgatgctataaatatacatatatatgataatggtaagaatttatggaatcccccatatgtacgtatatcttgatattcattcattactgcatgtattatcgctcccgctgacataaataataaagctttaaagaaactatgacatattaaatggtatattgctaaattatatgctgatattcctactcctaacatcattatccctacttgcttatatttcttaatcttcgacttttaaaatatatttggaccatttctttattttatatttatatatatatatatctcttatatctaaactaaattaaactaaactaaactaaactaaactaaactttttatattttttataaacttattatgtactgattaaattttcagctattaattaattacttattttttataattatctcacttatctttaaattctattcattcttttaatattaatggattatttaaatctaaattacttaattttttatgtgcttcatttattaatcttaacctatatttttttgctgatcttaatggatatttattaaaataattctctactagattatttacttctaatttcctatatatttcatatttaaatgcttctttttttgatggatatattttacctccatatactttttgtaatatctctagtaaatacatatttttttgagatactgttatctctaccctttttatttttgggtttatatatattgaaccatcactatctattaaaccactaaatcatccattttcttttgttaattcttttggcatttttaattctaacccataatgattacatacttttgataattgtaacatccttgttgggtttcttattaatccatttattcttaataataaattcattaaaccttttctatttgataattggtatctataagctttcccattacttactttgtatatggatcctcctaatttggattttatatcttctaataacattttatctctttcctccattgttattattaattttactctccctacttttgatacatttaaattcccatctccatctattactcctgataatcattcattataattcttatcattttctatatttaaagattcttttaattcatttatattatttttattactatttaataatatattactatctttattagtatttaataatatattactatttatagttgtatttatatttaatatattaatactaccatatctatttttatatttattagtttcttttttatttataattaatatattatatatattataaaacatcaaacgtatggcctctgagattcctactaacttacttatgtatatatattttcattcttttaacttcaatttgaaaaaccttattgataaggatgatgatttaaatatatttacattgttataatatttataacgagttttggttatctgcgaattctcatttttatatattatgatatcaacgcatatagtttgatttcaaatatttatcaaatcttttaatttttttattttatttgatatatattttcgagccaattgactcatagttgataatgctattattttttttatatcatttgatacaactgctattaatccagatactaatgttgttattcctcctaatactaatattaatattaaagctattggactatattctactatatatgaacatcttactaataagtatacccctgctataactaaacaagctgcatgtaataatgatgatactggtgttggaccttccatactatttaataatcatgtatgtaatccaaattgtacactttttgatgcacaacctattaacatacatattaatattattgttaacatatctgttgataagtatccatttaaactaaataatgtatcaaaatttaaacttcctactaagtatactgttaaacctaaacctattacaaagaatgtatcaccaaatctatttaataataatgagtttaatcctgattttcctgctgctatacgagtaaatcaaaatgatattaataaatatgatgctacccctattaattctcatcctaaaaataatattaataagttatctcctgttactaatactatcattccaaatgtgaaaaatgataagtaactaaagaatctttgttgatgtggatcatgtgacatatatactactgcatataaatgtactaaacttgatattgttactactggtattaatactgatattgatactttatctattaaaaatcctcaatctatgtttaaataatctacacttattcaactcattattatatttctatattcattatctaataccattacatcataatataatatatatgttcctaataatgacattattactgatgtacatactattatacgacttcataatatccctatatatcttcctaaaaatccacttattaatgaacctattaatgttgaaaatactattacgtttaccatttttttataaacttcttaatatctcatctgatccccttattttattaaaacttactaatattgataatcctatagctgattctattcctgctattattatttgtattaaactatacaataaccctatcatatcattatttatattacttattcatatactatttactgtacatcccattatcaatatctctatcattatatagatatctattatatttaatcctattgaacctaatactaataatattaattccatattctcttctctcttttattataaatcttctgaactctttcttcctttttataatcttttatatatatttttagatatacccccgcccccccgcacacacgcaggggggtgaattaatgaatacctatctttttatatataaatctccttctttctttcttttctttattcttataatctttaccggaatcgaaccgatattattgatatgaagaatcaatgtcatatccattagaccaaaagatcatcttttttatatatttttatatatattattatatatattttttttattattttatttataatattatatatattgtatatatatatatatatatatattatttttttaattatttatattattattaaagatctatatcatattatataaatataattatatgtatacttttatagtaaatataaaaatagcatagcataactaaatagattaattaatttattgttcatctattcatgataagaattctcctaatgatactgcttctatttttataggcatagctgagtgcattactccacataattctgaacattgtccataataaactccttctctttgtattaaagctgatgtttggtttaaacgaccaggtgaagcatctactttaactcctaatgatggtatacagaaatcatgtattacatctgctgatgttactataaatcttatatgagtatctactggacatactactgaagcatctacatctaacatacgtaattgtccttcttctaataaatcttcaggtactatatatgattcaaattctattgtttctcctttttcatttatgaaatctgagtactcatattttcaatatcattgtaatcctattgcttttattgtcattgctggtgctattacttcatcacatatatataataatatgaaacttgggaatgctattattaataatattacagctgggaatgttgttcatactatttctataaattgtccgtggttcatatatttatatgctatttttgaattgttatatactgttattacatttaaaaatatgtatgatactaatcctaatattatacataagtaaaaaaatatattgttatgtaattctattattccttccatatttggtgttgctgaatcttggaagaatactcctcatggtgttggtacatcattaaatatcttatttataaacattttattttctattttttttatctcgctcatattaattattctgcccccgcacctggtgcgggacttttaagtataatctttcatttctattatcttattttttattttgaattactaagaatcgaacttagattgtttcattatgagtgaaatgctttaaccattaagcaataattcaatctttatctcccccttttcttttttgtgcacaatcacgatttgaacatgaatcaatagctcatgaggctattatgtttaccaattacactatcatgctttttacgaattgagggatttgaaccctcattttctgtgtggaaaacagattgtctagccaattgacttaaattcgcttctacttctcttttattttatattattatataatttcattatactttatatatatatatatatatatacatatattttttaattaaccttaacctacctttatatatattatattaaaaatattattataattatataagaagattaatattaacatcctcatcaatagaatactatatataagaataatcagattatatctaatacatgtaagtataatatagttgtttctaagtttaaatgatgtgttgaagtaaagtggtataaatacattctagcataacatactgataacatcattgctaacattaccatatgtataaaatgtaaacctgttgctgcatagaatactgaaccgtaaacactatcagctattgtgaatgttgcaaaagtatattcacatatttgacataatacgaataatactattaatattgttgttattaataaacctaataatgtaccatttctatcttttgataatattgcatgatgagctcatgttactgttgctccacttgctaataatattattgtatttaataatggtaattctgttggttttattgatgttattcctactggaggtcatgttgctcctatttctattgttggtcccattgctgaatggaagtatgctcagaataatgatacaaatataaatacttctgatcctacaaataataagaatcctaagtttaatcctcttcttactgctattgtatgatctcctaagtatgttccttctactactatatctctagttcataaaaatattgttgctaatactactgatgctgctaatcctaatcataataatgatcctatatatccatgcattgttaatgcaaatgttaacataaatgataataatgcaaatgatatcattattggtcatggtgaaggtgccactaaatgaaatgggaataattgtaaatttgatcttgattttatactcatctttttctctcttttcttttttatctatctcttatatctctctacatatctttaatagatttctttctctctttactcttctttttatgtctatactatttcatttttagtatatatttattacttatattcattcctcgtcccctcccgcacacggggggcgatttaatttataaataaattcataatttttattaatattttgttataattaggactcgaacctaaagtcttttgattacaaaacaaacgcaataccaattatgccattataacatattttttattacatatttttttattcatttatatatatgaatgaatgaatgaatattttcataaatataattacatattttattacatattttttattaattaatttttataaataagatatttaataaataaatagaatgtaaattaaactacttatattaattagtacccaaatacttttacatatttagtttttattataacctattatttctaatataatactataatacatgctattctaacataatataagatttatatatgtatatatggtatatacatatataattatatagttaaaaaaaaagttacttttatattttaaatgctttcaatatttaaatattattaatttaacttaactgcctgcatattaacttttgattatttcataatttgtgtattactacactataatatacaacagtaaaatcattgattaactataactaatcctttcgtactaagttatataccttttttaactaacccctaaagaagatagaaaccatactgtctcacgacgtattgaacccaactcacgtagccttttaattgacgaacagtcaaacccttattagcttatactaccaataggataggctgagtcgaccatttttttgttttatagatagatttattcatatctatttcaattattttcataattgttcagactatgtcttaaaaaaaattcaatcatttttttctcgggcactcttggaaagattattgttatattactcactttctagtcgttgaacgtttattttcctgtccctccccgccctccgtgcggggggacggggactccttatatatagaaaatacttcgctgcaagttgtcatagtatattatttataccttagagttccttgacaattcacccaatttatactcgacatctactcatttatttattttatcgaggtggcaaacaacattgacaatatctactctctcatgttattacactgttatccctagcgtaacttttatccgttaatcgatcacttggactattaaaatgatctgttcattataccttacttacgtagaatttccacttgttagtgttaaattattgcacagttatccactattatattaattttatttcgattttttgttcgaatatttgatgtcaggtcaaatttactgtacataggtttttctaaatttataataaattcttattatttttaacatttttaatgattaattcattaattcatttttttaatttatattttaattgtatatggacatattcagttattttttgtgaaatcaacgccccatttaaactatcaatttaaagctgtcattaatatatatctatatctattattttactaataaatatgttttgatactttgattaggataatttccactaatcttttcttaatttagttattatttatatttcaatatttaaatattgaaactgaataaaataaaagtatttcatttgcatatctatatatttctttatatactaataatttatcaaataataacaacttattaaatcatagtaaagctgcatagggtctgttgagataggtcgatttattactaaattttccccctcgtagaactgtacgtgcaactttcatcgcatacagctcgcgcataatattattatattacacttttcttaagtcagtattctttcgaattaaatcatttgattctatctttattattaccataaagcattcactttttaagaaatcctttacccactattacatattaaattttacaatttaacttccacttattttttaattaataaatggataatattgggcttacctagtttatttaataatacttttacgattaccttagaatttcactatacgtttattgattatttaatatatttttattttagatgatatattaaatgtgatccattaagaaagaatcgagaacttctttctactatcaataatgagaattttcattctacgcttttacatgaattcgtcatcctattcatagtaatctagctcatttaccttcctatatttttatagatagatggatggcaaataatagtgacataaaaatacaagcttcacacacaaaaattacttctcatgcatgttgtattgagctcaaataatggattattaggtggattctcaccacattattattaaacaattaatctagtcgcactctcgtctacctttaggtacactgcatcttcacagcgatttcaatttcactaagcttatagtagatacagttgttacatcgttactccattcatgcaggactataattagtagtcaaggaatttcgctacattatgactctcagtataaagccgccatttacttaatttttataaatacatcttttaatatatttctttattattaaacattgggcagaattcacactttattctaaaacttatcgttttcgcaaagtgctgtgtttttggtaaacagtcgcataacatgttctttattcactctttttgactagcgtcagagcttttattttgccgagttcatttactataattaacttattcactttcatttataattcgcatacctgtgtcggtcttattacggtatcttttttataatattttttcctgtaccatacataatcttttatttttttatatgggcttatattattttatttattacctattaatttattcttttcagaataaaccttatggaccgattttttattaaaacctaatgcataaagtgaagaggattttacctcttattcgttactcatgtcagcattctctatttaattctatctctttttttcttttttctatacatttatatattataaataatatatatctatatattctcttttttataataattatttttttattatattctattcattaaatgctttgttaccataatttataaattctttttttttatatattattcaataattcagttataatttttaactccgattattatctatctattaatcgaccagaatgattgctcatcctttcctttaataaacccgttgttacacgttgatcatagaataattactgtcaaactaatcccattattgttttacgattaataaatattatttatacttaaattattatttggaactttctttattgatctgggctgtttcccttttgactgccaatcttatcactaacagtctgacgtttaattttcatattaatattattctgagattaaattatattgataatattattacaataccccaattattattaattgctttaccatattaatacattacttattaacgctatactaaaatatatttcacaaagaaccagctatctgtagatcagatttgtctttcactacttaccatatatcttcagataatattgcaacattaacctgttcagtcgtttaatataatctatacattacatatttattatatcttaaccacttgtatacggtaagatcatctactttcgggtctataattaataacttcttttcattttcattctaaatctttcttattttcgctatttattataacttgctaacccattatacaaaaggtacattattaattaattcttttttattaacctttaattgctctcaatttcacttattaatattattccctttcggtacttattacacttacttacattatttagtctttggattagttctccaatcttcgtagatttctttttcctactacttatttatacttctctattttctctcaccaatattcatagaatctatgtttatttcttttcctcaaggtacttagatgtttcagttcccttggttcttttctctcagtttcctttaggtctcaatatatttatcatatattattgtttacccttatgtaagtagctcttatattaataaattcatcttttttatttaattcacacatatatttttcaatttatttatttatatcttatttatattattatatacttttttttattttatatatataaatatatttttataaatatttattttctcatctcttatcatctcatctcttatctatcttatcttatcatatattatattatattatatagtattatatttttaatactatcatattagattatttatatatttacttatatattttaatgtatcatatatatatatatatatatatttatttatatttatatatttatatatttttatgtatattatacatatatatctaatgtaagaataaactatcttttaaatatgatgatgttaatatagcaaatacataagcttggatacaagctatagcgaattctaatattactattgcgaatattcctgctattggtaataaacctattatgaatgttaatttacttattcccatgaatgtttttactaaattacctaatatactcattaataaatgacctgataatgtattagctgctaatcttaatcctaatgatactgctcttgctgaatatgataataattctattaatactagtaatggtactaaagctaatggtgttcctactggtacaaataaactgaagaatactatattatgtaagtataatcctaatattgttaaacctattcataaacttaatgatattgatattataaatactatacttgttgctattgcaaagttatatggtatcatacctattaagtttgctactaatataaatacaaataatgtatatattaatggtacgtatcttccatatattgttcctcctatttgtccttttaccatatttactattgtatctactgttgcttctattgctattaatcagtttgatcctactattaattttctatctaatcctaatcctaatactattaatattgataatactactaatcctatatataaactaaatgttgttacatttattgcacttaaatctaatatcggtgatgataatgatacaaaagtgtttattttaaattgttctaatggtgaatttataaatatcattgacatttctttctctttctttttttcttataaaaaatatacatatatctctcataatctttatgattttctcatctctctctcaccttattttttaaggtacttttatccaccgtccccccgcacggagtgcgggggggcgaataaataaataaattctctcttttatattattatataaattaattcataaattaattaattatctctttatactttctttatatatatatatatatatatatatatatatttttatatatttaattaatgattattattaatatatatttatattaataaatttaattaaacctatgattgtattgctacagtgttaaatgtatggaacataggtgggtagtttaataagaattctattgattctgatttaacttcatttgatttaaatgtttcattactttcaaagaaatctggatcttttaataatgagttagtacttaaatctttattaactaaaccatttactaattgatcatatattacatatccaaagaataataatgatactattgataatactgctccaaatgaacatattgcattaaatcctgcaaaagcatctggataatctggtattcttcttggcataccattcattcctaagaagtgcattggtaagaatgttacattagctcctataaagaataatcagaattgtatttttgataatacattattaaagtataaacctgttaccattggtgatcaatagtaatatcctgagaatattgcaaataatgctcctaatgataatacataatggaaatgcttttaagtatatatatatatatactatctatataaacattattttaattattatttataattttatatttatatatatacttatgtggactatctcttcatccttaatttagaaacaaatggtatattatcatatttcggatttaaatattttattcaatctaataaaaactctgaataaattaaaaattcctcactattatagtcatatttattatatctacgtatttctataaaacgtaatatttttgatattctataaaatttaaaatctgaatataacctattttttcataaaatatctatataaataaatcatacctgatactgtttgataactaaatattattgatttatattttttatttaatcttaatgattcttttctcattaattttgtaggcttataattttttatagtttcatctatatttaatttactactatattcattatattttaaattctaaattacattctattctatttccagtataattaaatactatacttccatctgtatctattaatcctgataaatatggatcattttcttttattgtataatctgcttctttatattttattcctaaacttgtacaaccatcttttaaatatggtacttttaatcttattaacccatttatatgaattaatacttcttccatttcttttgtacttgaaactattcattttgaatattgattattttatttctataaatccttcctaaatgtaatttactttactatcctttgttaataatcttatatcacgatgttgttatttttattctattcttgttaatttttttataccatttatagtctttacttgtatattaccatctccatctattactcccgcaaatcaatgtaaaaattttttatcttctcatcatttatttttttgtaataattttgaatttgataatatactttcttcttctgaatacactttatttcttttttctagtttttcatgtacttcagattctttatttagactatttatatcttcttctaaattatatgattgacgtatagtctctgagaatcctaattctaaagttctattttttttaaaactttatttttgttttctgcggataatatattcatattttgttttaaaatactacattcattattatttttacttttattattgtaatta

SEQ ID NO: 5 - DNA, 1182272 bp, Pichia kluyveri
  >Nicaragua_Y298_000005F_chromosome
cacacttattttaaaaaatggggaaatgctacccgattgggtaatagtaaacgctattaatagcaagtaaaaaattaattaaacctgtgccgctcccaggaatcgaacctgggtctcatcggccacaacgatgcgtacttaccactatactagaacggcttagttgttttttggtatgcggtgggaatcctcattctgcgcgtgtcacgtgacgtatttttgatagtatagttttaacatcgtttgaatcaattattgaatagtatcttcttctacatttagtaaacacgggtcaaataacacgttgaacatattaaaagttaatatttttataaaaaaaataatcttacaatttaccatattttactaaaatctatggtcaataataaattttgaaattttacaatgacattattgctttacttcttttgaagatgaaagatatgttaataattgctaattaaacacattatagacgacagttatgatgaaacaatagtagagaaatgatttgtaaaacttacactggaaaaaacagtagagaatattacaattatctaaagtggagtatcaatatagactacatagtaatatgacctaaaatctaatacaatacaatataacaaacaataattaaataacttaaataggtaaactaataacagtattaataataatatgacgaaatagaaatgtaatcaacaatttttgataagatgaaaaattatgtgggggaaaggtaatcagaaaattgtactggcattatacagattatatgattataaatatagagttgaatgtccgttataggaaagtaacgttattatcttgttcatcttcataaaccaaccaatgtttaaaacaagagaaatacctaatataacaaagacaactaatgaattattttcattaactgataaaacatgtgttataacaggtggatcatcaggaattggattagaaatagttaaaggatttgcatcaatgaatggtaatatagttataatttataattcaacaccagttgatgaattaattaaagaaataagtgaagaattcccgaaaattaaaataacttcatatcaatgtaatttaaataatgttgaagaaattgaagaaatgattcaatctataattaaagaatttggtaaaattgatatatttattgcaaatgcaggtattggatggttaaatggtggtgttaatgattttaaatcaaaggatgaattagttaataattgggaaaaatttattaaaattgatttatcatcagtttattattgttgtgcatttattggtaaagtatttgccaaacaaggttttggttcattaattttaacatcttcaatgtcaggatatataattaatataccacaattacaaactccttataatgttgttaaggcaggtattagacaattatctaaatcattatcaattgaatggtctaatattggtaatggtaaaattagagttaatagtgtttcacctgggtatgttaaaactaaattagttgaaaagatggacccccaattagttaatcaatggagtaattcaattccattgggtagaatggccaatccaaaagaaattgttggtgcatatgtttatcttgcaagtgatgcaagtagttataccacgggaactgatataatagttgatggtgggtatacctctgtatagtttaaattgccctattttctttatattattatcttactcttcttcttcttcttcttttatttgtatcaacaaccactctgtaattaacgtcatggatactaagaaattaacaagtgccttaaggaaatcaccaaaatctaaaaaggttggtagtagtaatgtaagtaatgttaataattctactactactactactagtaatgttaaaaaatcaccaatttctaagaaagtattcaaaccaaaatatgaacaacgtgataatgtagaatataatgagtttattagtgataataacagtaagataataactggtacatcaattaataatgcaattttatcagataatgatgaaactaaggcaaataaatctttattaattcatcaaggtaaagatccatttagtgttgatattgaagcttatgattctcaatatggtagtattcctaataataataatagtgataatggtgacagtaatatcataactactactaattgtacaaataaatcatttttaggcaatattagtgaaacaatttcaacattaacaccagttcaagtttatatattaattgcaattttaatattattaaccattatgactatagttctatattttacaggaaatatagatcaattaagttatatttggaatacaatcttttgttggttaggaattattgaatgttctaaatgaatattgaaattggaaggtgaaaaaaaaaaattgcatgaaaaaaatttcaaatttattttattttgtatatcttatactttattttactttatttgcttctgttttaagttctaaattctgtttatattactatataatataattcattagagtatacggtattttttgctaataaattccttagaaagaacaaaaacaatggttaaaacaagatcacataaaacatttgatgatccaactactgaatttgaaaaaattgaaaaagttgaagaaatagaacaagtagaggacaataatgaacatagtgaacatagtgaacctagtgaacctagtgatagtgatgatgatgcaccagaggaagaaaatgttacaatttccaagaaaaagattataaataaacaaaatgaacaaaataagatacttaagaaacaaaaggaagaaagtaagaataaacagagagagaatgaagaaaggagaaagattgctaaattagagaaagaaattaagatattagagaagcaaagaaaggaattaaataatattgaagatgaattacctgatgaattacctgataatttacttgaaagtgtgagtaataataatagtaagagtgaagaacctactggtaagaagattacatttaatgcagtagaagaagagaatagacttactaaacttaataagaaacatttaagggaggaaaaattaaagaaattaagagagattagaaataaacaagagaaagttgttgaaggagatattcatgttaaattattaaatggaaatgatattaataattcattaaagagagataatcaaatattaaatcaaaaggataaatggttaaatagaaaacgtgtacgtagagagtaaatagtgtttgtttgtattaatcatgtaatagagatactaagattggtattatcataccaataattgtagcaaaataattccaattagaagaaggtttatcagtaattgtatcatcagtgttgataatatcattatttgttgaatgatcatgacatgaaatgaaagtatggaaactaacataaatgaaagcacctgtactaaatagaagtatgaaagtattatcaaatgtagtattatcagatgatgatgatgatgatataatattatagataaaataacttaaccaagcaccaattggagcagatattgcaaataggaataaatggaataaaattattaaattatcaatttgttgatttaataaaatagaagttaatgagaaagcagctggtaatttatgtaagaataatgcaattattattatgaaaaggttagtattttctttattatctttattactattattttgagataaaattgttgaagttaaaataattccatcagtaatacaatgtaataataaacctaaagttgttgaatttgtaagtactgaagtgaataattgtttagaagtgtaattgttataatgataattagaatatgtattgctataataactatctgattcatcagtatctatactattaatagattctatactgttattatttaatttctgagagaatgtatcaattgaataaagtaagacaaatcctaataagatttgaaacccaattagagaagatgatgaaataagggtatcatagggtatatttataattgcttcaggtaatactattgttagagaagttgaaagtaataaacctgaagttaaatgtagtaaaataggtaatgaaattgagaaagagggggaatatgaataattgtgataatttgacgatataatccataatgggggtaatcccgctataaaggaggatattgccattagcagagagtaggtgaataagtcagatactgctgacattgtcgtgtactctaagaagaagcagttaagtgtatactgttaagagtccatgtccaatattacataatcaacaaaaatttaattgttagtgaaattttccatttctttgaatttattaacagttactatactgcttcttcctttattagacagtggcaatgtttgcattaatcaccaatacagttagaagtacattcagtaccatcacatccacctctgcaggaggtttaataagttcccaatttcttctcatgcaacaaagatttggatcaagaggtggtaatagaggtaatacatatcaaccaaatactttaaagagaaagagaagattaggatttttagctagaatgaaatcacgttcaggtagaaacatcgtcaagagacgttttgagaaaggtcgttggttcctaactcattaatatatgtactttactgtataaccactgtatatagctaataatattagaataatatcctacacgtgactttactatggggaaaaaattttattttattttattaagtaaattttattttattttactttccatcttttatcacagctttatacttatattatcttctcttgaagagtaaacaacaatgtctaaacagggtcaaagattcagagctatcaaggatgataccgctaaaccaactctctttaaaccaatccaatcacaaactttcctacaagatgaaaccgtactttcatatgttgatgaatttataaataatcatccttcaaatactcttaataatactactaataataacaatactactacatacagtgggataaatccaactgtattatctcaacttaatcgtatgcaaagaagtttaagaggtttacctcctcttttcgatgatgttagtactaataatactactactaataatactactaataacactatatcaactcccagtgttaataagaaagtagtatttgatgaataatctatactttatatcacatactctttatctactctttatatatactctaaatactcttctataataaaactctctataataaattattaacatgaattttcaacaagggcgtattacttcaacatttttatatttatatcctttttaattaccctttcatcactcctttcttttaaataaacaatgacagattcattatctgacattaattcactcatttctaatactccaagacctaatctaaatataaacctcaaacctttatcaataccttcaatatcacaatctcaaattcaaattcattcttcaaataataatataaataatatcaacataaatgataaatcaactaaattatcagataatttatcaaaatatacttcaaatacaacaatacccaccaatacaacgaaaaaatcaggtattggtagagattattggttagatgattcatctgcaattaattgtaaatcttgtgataaaaaatttacaacttttaaaaggaaacatcattgtagaatttgtggtaaaattttttgttcaaattgtacaacttttattaatggttcgaaatttaattataatggtaatatgagagtttgtcatctttgttataatttagctgaaaaatataataatgaaatgttttcaagtgatgatgattatgattttgatgatgataataatgaagatgataagaaaagtctcaaaaataatattaataataacattaatgataataatattatagatcaatatagatatcataatacaactggttcatctataaataataacatagatccaactcctgaaattatacccccttcaaatgaaaatcaacttatatcatttatgaataatcatcaatttagctggcctaattcaactgattcttcattattacctaaaaattcaattaattataaacataaaaatttaaatatgaatataaacttaactcatccacctcaattacataaatcaaataggagaagaaatataagtggtagatataggaatagaaatatttctaaaaatttaaattattataatgatccaattaatgaagatcatcttattaaatcatcatcaacttcatcttttaaaaataataactttaccaatgtaataccattctctgatgaatttcaaaaaattggtgaaatttattcatcttcattattaaatgaactattaattgataaaaatatttcaaattataatgaatggtcaaatatcttaattaaattacttaaacatttacattttattgatattaatttaaaacatatatcaaataatcttaatgataacacaactacaacattaaatgattctaattataattttacaaattatattaaaattaaaaaaattcaaggttcatcattaaataattctaaaataattgaaggtattgtattctctaaaaaattacctataagatcaatgccaacattaattgaaaatcctaaaattatgttaattacattcccaattgaatatgatcaatcaaataatgataattcaaattcttatcattttcaaagtttagaacctttaatatctcaacaatatgaatttattaaaaaattagttgatagaattagtaatttaaaaccaaatataattgtttcaactttacaaataaataattatgcaattaaattattctcagataaaaatataactgttataccatcttgtaaattatcaaatttaattaaattatctaaatttacaaattcaacaattataacttcaattgatatacttgcattaaaaccaaatttaggtacttgtggaattttcaaagtattaaattataaatttaatgatttggtttataattatgttaaatttgataaatgtccaaataaaataggtttaacaattctattaagggataaaaatattgatgttttaaataaagttaaaaattctttaacaattatgatatatgcatttgttaatttaaaattagaatcaagtttcttaagagatcaatgtttgaaaattcaaaatggtcaaggtcaaaagattttaactgagaatttaaataaaattgaatttacttcattatattcaattaatttgaaaaattatgaagattttattagtttagttaatgaaagattgataagtacttcaccttggataaagtttaaaccacctttagtgttaatggaattagaaaatttaaaatttaaaattaatgaaaatgttaaattatttgaaaaatttaaatgtttaacatttgaagaaaagataaatcaacaattagaatattttggtgaaatttttgaaattaagaatgggaatgaaaatgaaattgattcaattgctaatgaaatctttaattataagaataattatttaaatgttgatattttattttatttaaagaaatgggaacaattttggaaaaatagagaattaacatattttgatccaaattataatcaaaatattgttgtattatttagtatgatttccaagaaaaattttactccatgtattgaacctgaaattcaattaattgatttttattggcaaaatgattttagtttaggtcaatttattgaatttatttgtttaaattcagaaaatatttgtaatgataattgtcaattaccacttaaagatcattatagatcttatgttcatgataatggtaaaattgatatattcattgatttagatgattcaaatataattcataataatataatgacttggagtgtttgtaataattgtaatgaacaaactccaattcttcaattaagtgataattcatataaatattcatttggtaaatatcttgaattaatattttggtttaataatgaatttgatttaaaaattttaaacaataataacaataacaataataatgatgaaacaactaatactccacattgtcattgtaaggataataaacaacattcatttgatttctttaaagattgtacacattttttcagtttcagaaattataaagtcaaatttgtctatagtaagattgataatttaaagttaattattcctaaattcaaattattatggaatccaaaatatgattataaaattaaactggataatttcaatgatattaaacttaaaagttctaatttctttgattcagttttcaatagattgaaaagaattaaattggatggtactgaattagcaattgatgaagttgaatcaggtaatttaaaacttattcaattaaaggaaaaagttatctcacaaagaggagaaattgaattattattagatacaatgtataatcaatcacaaattaaacaacatttaaaacttaatatagttttaagggaagttcaagaattatcaagtttttggaatattgaatttcaaaattttgctaagaaatatttaccaagtgaaaaggatgttaaaaagattactgctttccaattagatagattatttaaaagtattgcagggaaatttgatgatgatgatgatgaggaggaagacgaggaagacgaagaagaagaagaagaagaaagtgaagaagaaaatgtatcgaaggatatgaacaatctaaataccacagaaaatgttgacgctgataataaggaagtttctcaaagtgatataaaggatcaatcattagagttaaaacaacatactgaagaaggttcacttaaatcaggaactgatatcagtaataaatctagaaaaagctatggtgaattagagaaatcaggtgataataagaataaatcagatatgaataaaacaattggtcgtcgtcatagtaaaggacaattaattttaaacaaaattcatgaacttaatggtaaaggaggagttgatttattaacaattaatccaaataaaacagttaatgaaaatttagatgaaggtaaagttaaggaactcaccaaattctttgatacacaagaatatttcaatcaaagagaacttgataaacaaaaacttgatcgttttaataaatatacacctaaagttaatactatgagacctaaaattgaaatttataagaatgttacagaagctgttaattctgaagcttcaaataaagctttgattagaaactctaaaaattctaatgagattatcgttactgaaagtacaattaataacgatgaaatgaaaaatgaaactgatattattgaaaatcagaaagttgagaaagagaaggagaagcagaaacaaaaggataaagagaaagagaaagaaagggaaaaagaaagagagaaggagaaagaaagggaaaaggaaaagaagaagagcagggaaactcaaaatgaaaagatatcattacttaaatcattaacacatttttgggctgatagatctgcaactttatgggaaccacttgcttatcctttaatttcaagtgaacatatttttgttgattctgatgttattgttagagaagatgaacctagttcaattattgcattttgtttaagtacaaaagattatgaatctaaattaagtaatgtgactaatatacaaaatgaaaatgttgaaaatactgaaaaatcaaaggaaactgaagaaatgaaggaagaaattaaagaagatgagatcaatgatggtactactaacaatgataatactaataataccaacacttaccaacaatggaaataatgatattaatattgataacaatcctactaataattctactaaataataataaagatcttgatgctgaacttgaaaatattatgcttaagaaaggattccatttgaaatatcaatttgaagatggttattcgactattttatgtaagatattcttcacacaacaatttgatgcattaagaaggaaatgtggtatcaatgaaaattttattgaaagtttatcaagatgtgttaagtgggattcagcgggtggtaaaagtggatcagcatttttgaaaactttagatcaaagatttattattaaggaattaagtaaagctgaattagaagcatttgttcattttgcaccaagttattttgaatattttgcacatgtattatttcatgatttaccaagtgttttagttaagatttttggattttatcaaattcaagttaagaattcattaccaaattctaaatcatatacaatggatattttaattatggaaaatttattttatgataggaaaattgatagaattttcgatttaaagggatcaatgagaaatcgtcatgttgaacaaactggtaaagagaatgaagttttattagatgaaaatatggttgaatatatctatgaatcaccattatttattaaagaaaatgataaaaggttattacgtgcttcattatggaatgatacattatttttagagaaaatgaatgttatggattattcattagttgttggtattgatcatgcaaaggatgaattaattgttggtataattgattgtattagaacatttacatgggataaaaaacttgaaagttgggttaaagaaaaaggtttagttggtaattctggtgttggtaaggaaccaactgttattactcctaaacaatataaaaatagatttagagaagcaatggaaagatatattcttatgtctcctggtgtctattatcaaggtacaaccaactccaataactctcgttagtttataatagtgtataacaacgtatgtatcgtaatatatccattcactgaaacattaaacttataatctcaaatacatgttgtaaattacgtaatgaaaagatgaatttgattaaatgtttactgctgggattgattatcgatataattagtgataaagttcttcttctgatcattgaacatctattagaggaataataagccattgaatgattagagatagaacaaatttatatgttgcctataggaaaacattccctaaacatttaaagaagaaagttaccacggaacagaggtttaataaactgagacaagaagaagagggattacttggatctaatgatgaatacaatgatggtattgaacttgatgaatttgtcagtggttccaatggtaattctacatctttaaatattaatattgataaatatacagatttaattcaagatattgaaaatcaaggtaacgatttaactaaacatattaaggagaatatgaaacaactaagaaaaaagtatagagaagttttattaccacaatttgatgatgatttaattcaaagtgaaatgaagattgttaatgatatatccaatcgtataactgatgaaattagaatgatttataatgttatcaatgaattacagaaattagataaaacattggaagaaatggaatatgagaataatgaatttaacaatggaagttttaaagatattaataatggagaaacttttaaaggaactagaatacttgtaagtaatttgaaaaagaaatttgcaactgttgcacaaagtttaagtggtgaatttagagaaatgcaggggaaatatattaaatatttgaaaaaagatgaagatatattagattctaatagtagtggaaaatttaaggataattttgattcattagttgatgattctaaggatatagaaagttattcaagaactgcaatgcttgaaagtagtaaacaaatagagttacaatcatcacaaatgcaaaatcaaggtcaaggtcaaagtcaaagtcaaatacaaataaatagagaagaaaatagtttagttgatgatcaacaatatttacttgagcgtgaaagagaaatttataaaatatcacaaaatgttgttgaaataagtatgattttcaaagaattagagaatattgttattgatcaaggtactatattggataatattgaatataatttaagtagaacaactgaaaatgttcaaggagcacataaacaattaaacaaagctgaaggatatcaaagacaaactaaggaaatgtaaaattgttttatttttggtattattgatatttttattattaatgattttaatggtaaagcctagacatgttgatcattatatacatgatggaacaaagagtgataccaataaagatactggagagaagactcctgtgggaagtgacaatagtgagagttcaagtgataatgttgaaaatattggtgttgataatacaatcatcgaagaacatccagtggatgaacccgaacaatgtattactttgaatttagattattttatataccaataagtaggattgtatactaagatgatagttttatgataataaatgaaagaatatttataagttattctaactataaagtctaaaaaactgaaaaagctaataaaatctaaataatgaaatctaaatgaaaaagaagaagctaaagcaaagcatatttatataaaagaaaagaaagggaaaagaaagagtggaagaaaaccattcaccaaaatcaacctatatgactcccgtctttctgtaattgtaaaaatgtaaatgataataaaatatttcaaatattttaaattaaataaatccagaatatggaccatcattttgtgcagatgcaggtgggaagtttattttagtacgacctttatatttcattggaacgaaattattttgttgttgattataattaggaccatttggtggaattgaggaattaaattgatttctttgatttggattaaatggttgttgaaattgattatttggataatgattattttgatatggataaggtctattattcatattttgttgataaccttgttgtggtaagtatgggttcattggattatttctcatacctgagttcatattcatattcatattcatattcatgttcatattattaggtctacccattaacatataaggtttaggtttcttcatgtacatactcttattttgatttggcattgaagacatttgattttggaaattattcaattgacgttgttgatgtccctgttgatatggattaccttgattattattattattattatattgattattgaattgattattgaattgattattgaattgattatttcctaatggaattcttggcttttcacttgcacctgcatagtaatttgcgttgattggtctttgtgaaatacttgtaaaatttgaagatgaactcttgaaagacatattttcaacattaagacgattatcattaaaactcccaccatccatcatactatcagcatcattcacataaggatcgttaattgatgggacttttaaggataatttagatgaagaagatttcataatatcattttcttgttggttaacgttaatggaactattcttttccttttctaaatccaaaaatgatgaattggctgaattttcattaagtagtacatgatttttttcctcaattccaggaatattattaatatctgataaattatgacgatattcaaaattattattaccgtcaaaggttgctgaggtatcataattaatttcgccattatatttattttctatttcatcatcattatcatcatcacttaaaatttcatttggtgaaggtaataatttaaataataaggcattgaaaacaattgcagccaaattaataacagcagaaggaattaaacaccaagctaaccaattaacattaggataaaatattaagaaagtgattatgcaaacaaaagctgatgttaagaatgctaaaacagtagttaatattgttaaagagataaaccaagttgaagaagtaattttcccatttattgaaataatcaatgatgttaaaaatattgaaaagaatgttaaaccatgcagatattggggcaatgatgaaataagttgataaatcatccatttttgaagaggataatatattggatgatatatattctgatattgaattattaagtgaaattggagaacaagttaaatttgaatctgaatctgaggtacaataaccaaatataccgaatatagttccatcatttgattttgctaaataaatattcttgagagttggagctgtgatggatacaagtatcaagaaggctagaggtattagttgggggatgattgacaataacagtagtttcatttttttgattgtttctaattttagataaggatcagataagataagataagatataatgggatactagagtaatggaaacaccgaataaaaagagaaactagtttgagagagatgatttaaagttcagagacctaccaggagagtacctaccgttgcagaagaagagacaacagaagacaacaaaagaaagacaaacagtaaagataagataaatcaaataggggaaaacggtggaaattcatgttgcgatttgaaaaggtggctgatctatttttatttaccttttatcttttattaactacatgtttcttttctacaagttctttttatagattattagaattgagtattttatagtaattgattgtatagggttatcatagatattattattatatctcaccatgtctcaaccacttgttcaatcagattcagtcttcacttccaatgatgataacacgtgtgttaatttgaatgattataatgatgatgatcttaaagaaagagagattctgatcttgaatcaacaatccaaatctcaattagcactttcagaccttaattcacctgaatttcaactgaaaagcaacttaccaagggtaaatttaacattcccggatacttccgtaaattcaccagctccaaaaatgtctccaaatggtaaaatattcttctttgatattgataattgtctttatcatagatcaactagaattcatgatttaatgcaaatttatattcacagatatttcaaaaagcatcttcatcttaatgataaagaagctcatgatttacacatgcattattataaacaatatggtttagcattagaaggtttagttagattacataaagttgatgcaatggaatataataaagttgttgatgatgcattacctttggataaaattttaacacctaagtccaaaattaagaaatttattacttgatttgaaaaaatctggtaaagttgaaagattatggttatttacaaatgcttataaaaatcatggtttaaaagttatagaacttttaggtttaggtgatatatttgatggtttatcattctgtgattataataattttcccttgaatatgtaaaccaatggaaggtgcatttgaaaaagctttcatagaatctggtgcagttaataaggaaaatgtatatttcattgatgattcagaaattaacgttaaagctgctcgtaaatttgattggggtaaagttattcaatatgttgaacttgattcagatcttcccgaagatctcaatacttatccagctcttgatattcatattgtaagatcaataatggatctaagatcagtttgttctgaattattttagcctgtaatcactatcctttatcgcaaacatcttatatatacctcctgatatctcccatataaaccaataaaaataattgaataacaatgtagtgttttatgatgcactgctatcttcagcaaagaaatcttcaacatccatagccgatatttcatgataaataaaatctaatattctcttacttttaggtatatttgaatctaaactgttttcacatttcttaaaataattgtttttcaatcgtaaaattgatcttttaaaactttcatattttttataatcttccttcatccatttcttaataaccaattcattgcttattatcatatttttcattagttcaactttcatgtaaataatggctggatatgttgtattatctgcttcttgtaattgtgcataggataaactttcaatgtatgtacaaaatctctcaaaactttcactgttattgtcgatattattgacatcatctacataattatcattatcaaaattccattcaacattatcattaaccctattttcttctaaaaagtgcatcactaacttgtcctttgaaaaaattatcaattctaaataatgtgaatattctttccacaaatataaaccaaagttcaggttgactttcatttaaataatcttttaaaatcttattgatcaatgatatattttccttatattcatatactttatctaatataatatcaataacattcatcattttatttttgtaaagataggttctaacatctttgccaacattataatcaagactcattagaattagtgaagaaagtatactcttcatattttcaactaaattaaatgaatctattttcaacagttgaataaatttaaaagcttgtaatccacatccatcaattggcaatggatctttcctatcaaatttcttctctataggagcattactttcaataagtgtctcatcaaatcctaaacaatccaaaacggttgttaaatttttatattggggatcatcatttatcttacatttactaccaataaaattctcaacatattgaacagaagctgtttttattaatatatcaaaactattgttatcatatagcatattagtctttaaatcaacaataccttttttagtgaaacatttaaatgggaaatatttactgaatttagaaagtcctttctctaagacaactttatcatatacattattattatcttcaatgatcttcttcatatcttttttcaaattcttcatccatcttgaatgaacctttacaccatctgtatttatttctaagaaatctttattaacatgatcgacaacccattgatttatttccttttcaacgaattcattatttttagcaatattatcctcttctttgaagcaatttattaatttcactatctcttttcttctctgttaatatcttattaaaatctttcaagtaaaaagagtttatagatgttttattaactgaaaatcctaattctttatccaatggattcttcatacgtgattgaagttgttgtattatatcaactgtgttagtacgttttttcactttctgatttctcagtttatctgaatcacccaatacactactattacgtttcttagttggtgataatagaggattagggaccttatttagttcaagtttcttctttttaggtgaaagtaaaagtccaagagccttattattttcaaacttcccaaataatggatcttcctcctcctcatcagttggatttcctaaaatatcatcatcatcatcatcccaatcggcaatagggtccttggacatggtctataaagtaaagttgacgcctttagagaccgtaaataaacaacaaattgaaaagatcttagacagtaaaacatgaaactgaaatttcacctaaattttatgcgtgttttcatttccttagtaactgtacaaaagtacatgctttattttactacagtttttttacaatgtctataagtataaaagtataaaagtataaagtttacaacggaattaaggattgaacttccttttcttgtttttagaactcttgtgtttagatttcttatcgaaaacaattgatggaattgcaatctctaattcttcactttctggaacaccagtttcagatccaaaagttttctttctccattctcttagatgtttactcttagtaactttttctcttatcctttgctaatttttcctttggtctatatggtgctaatttctttaatccaataaattcatttaaatctttatcatcagcttttaaaatttcattataagttaatccaaaactttctggtgaaacttctctatatttaaatttaaatttggacttctccttatctctacctcgttcttcttcaacttcttcaagtaaatctactgtcttggattcaaccaatcgttctgctaattcttttaccttattcttttcttttttcttatcatatttttctgccttcttttttgatttgcttgattttttctcttcttcaactacttcttcaatttcttcttcagcattatcttttacttcctcattttcatcattatcagattgtccattcattaaatcatcgtcagaccattctggctttttaaatgtttcatcatcatcaccataatattcatcattgaaaatttcattcatctttgcatcccattcatcattatcaaaatcttgattaataagactatcaccgaaaacctttaataattttctcttcactaacattatcaccaactgcttccttaatttctttaattctatcagcaactaaattagttgtcttttgtttcttcttctttaatgctaaatcaatttcttccttttgttttctagcttcatcttgttgctttaatctatctctttttctactattcattttttcacgtctcattgtagcctgtgatctagcataactgataatttcagttgattttggatcttcataacggaaattatatgcattttcaaaagtttctgctgctttgtcaaattcttcatcatcttcaacttccatttgaacttcttcacccttatctggtaaccatgcatgattttccataaaagcctctaaaaatttttcaccatccttctttggatctggtagagcaattggtgcagctttatttgatgattcaacagttttcttttcctttttaataagaaaatcatcaacactttcatcatcttcattatcactaccaagagcattatgaatttctttaattaaattttccttgtcttctctttgttgaactgcatatggtttaatatcatcaactgatgtcataatactttgtgcttcttcatctgcaagtaatgctttacgatgatattcctttaaatataatggcttttgatcagtagttttagttgtatccttagcttcttcaccttcttcaccttcttcaccttcagctccttcttcatcttctttgaaaaattttactgatgaatcaaataatcttttatcacctgttttaatagcttttaaaacttcatttaatccattttcaacattttcagttaataacataccataatcatcttcctcttcatcactttcttcttcttcatcctctgcttcttcttcacgtaattcttttttcagttcttcaatatcagctggtaatggtttaacacctccattgagtttagctaattcagcttcttgttgttctcttgccttttttgctgcagactttctttctagccatggcttagttatctccttattgataataaaaaagaatttaacttattaaacactagatttcatgtagtgaaaaaaaaaattattaacaaaaaaaattattgttagtaaaagtaaaaaaaattaaaaatgtaaaaaatgaacaactgctctcactcagagtcgaactgaggatcgctacattactagtgtagcgccttaccaacttggccataagagctgttatatcaataaaattttggtgttatttccactcttagagtgttgattacgtaagcaaaatatttggataaaaatttgtcttatttttgccaaataagttaattaaaataaagctttaaaaacagctttggtaaattttttaaaatagttaagtaaaaagcccaaattcaagacaaaaagcataattatgttttttgccgatacccgaataaacaatttacgcctataattaaaaatacccgaaacataggcacttttttgaaaatgtttttttgccaaatgaattcactggtttttatagattatgtaagcataaacatggtttacgcgtgctatttatcagcattttgagtggtttcagtacttttttaaatctaatatattattctaatttggtcataaaaatcctaataagttacacagacgatacacctaagtttatttcttttctaagagaaaaagtaccaataatattagaaacagatgtaacatgtaaatcttcttttacaattaaaaacgtaaaaaatattctatacaaaattatcaaatcttatcaggaagacaaaggggatcctttaagtgaaagaaatttgaagttttttgcaacaagtacaacttcaaaatttaatttcctgtataacgagagatcaggtcaacacatgtatggtgatattcaatttaatgaagctattgataatattattcgacaaaatattaatgatgatattgtgactcttgaggatctagaaatgttaataaaagaaaagctaagttcatttttaaaaatttcaaaaatgcaaaattaatcaatagaggttttttaccgggactcttgtataatagattcaccatttattgaaataagcgattgtgacagatacgacactgattatgctttaactagtgattttgggagtgcttctggtgatgatacatcatctgatgatactttatctgaaatatcagtagataaacattcaaattctaataatattaatgatcatgagggtttttctgatgcttttgattcattccttacagataggtttccaattcctaataatattaatgatcaagttggttaagaacccaagattaaaaccgtatatatattcaagagtcccagtgtagtaactctattagttagtgttgcatttttgaattgtttaaaatgaacttagcttttcttttattaacatttctagacccaaatttattctcaagagtcacaatatcatcattgattatcttgttgataaattttatcaatagcttcattatattattgaatatcatctatagagtgggaaattttgtaacttttttacatagtaaaattttcaaaacccgcattttagtgcgggtgtaaccattataattcaaatttgttcgattttggggctaaaaatcgtatgtttccctgtttatttcaacaatgtgtaagtttttaagggtctcatcggtatattttgttaaaatttgtgtatacaagaaatccgttttaatctagttacttctattatgaagtattttatataaatatatatgtttgtgagtttgattccagtcagatttgtaataaggaataccaagataataattaacaagtaatctcaaaacaactcttaaatataacttaaagtcatcttcatcatcaaccatattatcaacatcgttaattaagttttggaaacacattagttccatagtagacttattaacaagcataccatcacgtaccttttcccaatttttcgaaacatttaatctataatcaatacatttattcaaggtttccctatcaagttgtgaaaacttttgtctatagttctgtttcgtatttccactgagtagattatattcaaaagaaaaaatgtgaaacttatttttttcatttattggaacattatggaaaatattatcacaatattcctctatcaagttcattttcctttccttcataatcatatcacctgtttctattgaatcaattagagttcttttcgtatttgtaaaactagtagaatcattaagtcctctcattttcaaataaaaatgtgattttaattgtaattgttagtttatatcttaacaaatagaatgttttctacgtggattgttcttatcatatatcctcttcactaactgatgattcacaaaaagataaattcttataatttccggaataccttaattttcgacaagacgtgattctgtataaattatagatttacaggagccacagtcgacacttttcaatttgagtactgtttagctgagatggacaagaagcttcagatagctaacagtatgaatgttactagtgttaacgtcgttgaagaacctatcgattttctaagtaaagaatcttcaaacatatatatttggttacagaaccgtatttttaaagaaattttctaccaggagggcagattagataaatcaaagattgcaagtgaattaagattcgcatcatctgctttaacatcctttttattctgcaaatttcgttccatctggtaggcagtttggtttcttgaacagtatctgcagttacaattcctacagaaatgttgtaaatgattaaacttgataaacaattcttgttcttgaagattctttacttagaaaatcgataggttcttcaataacttgaaaactagtaacattcatattgttggccatctggagtttcttttccatctcagataaataatactcaaactgagaattgtccactgtggctcctggagttgatcctgctgcttctaaagccttaatgcttctgtccatttcatcttcgaatccgtatactctattaaaaccatcttaagcagcaatttcaatcgctttctgttcttctttcaactcgttttctttcttttctaatgcttcttccttttgtaacgacttcttttcatcctctacaatttgatgtagagttttctcaatcgtttcctctcttttgagcaattcttcttcgttttgctctattttcacctccttttctctgagcttccatctttgaattcatcagaagcatagccttctcaaccgcagtgtttatttgtgattgttggctttgttggagttttgcaaacaattcatccaaattgataatttctggcataccgttgtcgttctaattcttttgtgttttctcttttcttgtattttattattcctttctttgttcttcttttcccttgaaactctttatcgttcaaattacttataaaaaatattttttataatttccggaataccaaaattacattcaattgctttgttatacaatgacggagactgaactggacatatttaaactttaatatttacttgtctaaacaagttaaagtggatatcgtagcaataataagttgattgatatcagacaatgcaacatcgtccattcaacaatcaacgacgcgtctaatgggatcttaatctttaataccatattctagagattatgtaagcatgaacatgaactttacgcgtgtaatgcatcttggcgttatagttataatttaaaaaacttaattcttaatgagttacacagacgatacacctgtatttctttcctttctgagggaaaaagtaccatcaatactagaaacagatataatatgtgtatcttcttttactattaaaaatgtgcaaaaaattctttataaaattatcaaatcttatcagcaagataaaggggatcctttaagtgaaaaaattttaaagcgttttgcaacaggtacaacttcaaactttaattatttttatagtgagagatcaagggaacataaatctagtgacattcaatttaatgaagctattgataaaattgttcaacaagatatcaatgatgatattgtcactccttagaaaaaatatggttcgaaaaatgttaataagaaaaaagctaaatttatttttgaaaaattcaagaatgcaaaactaacaaatagaggtgctacactgggactcttaaatctatacggtttgaatcttggaattttaaccacgctgagagctagtgcaagaagaagacgtaaatttgaagatttggaaaaaattaatgaatcatcatttaatttcatgaagttaaatacaaagaaagatcgagatattgcagatacattgaatgacatttttaattgtttttttaatgaaaaaggatgggattaaaatggtataatagattcaccattcatttatataaacaattgtgacgagtacgaaactgattacgttttaactaatgatgagtttgagggtgccactgatgaagatacttcatttgatgacaatactttatctgaaatatcggtagaagatctttcaaattctaataatattaatgatcatgtagataattccgatgcttatgaatctttgccccctgtaggtaattttcccatttctaataaaagaataaaagttagttaacgattaaacttctgtaaataagtaatactttacgtttaaacaaaaaaatattacaatataaataggataaatagatatttgaaaaatattagttttcaaaaattcagtcaatatcagtctacatcctgcattagaaccaatcatcatttgccatatcatagtcggcatatatttcatatacccactcgattaattcgttgtttgccaaaacataaattgtactctgactccctttttcttctcttaaaattttttccttcaaagtattaacgattagtatcttatgtgttttgtaaatatttttatgattttgattccagttaggtttgtagtaaggaatatcaagataataataaacaagtaacctcaaaagatcccttgtaaatcgctttatgttacgttcaaaatcaacctcatcaccaacatcttcaagtaattctatggaacacattatttgcatagtagatttattgataagcattcccttacgtaccagttcccaatttttcaaaacatttaatctatgatcaatccatttattcaaagtttccctattgagtcctgtaaacttttttgtatagctctgtctcgtattttcactgactagttcaaattcaaaagaaaaaatgtatactttattcttttcatcttttgggacattatggaaaatattatcacaatactcatttattaagtttgtttccttttccttcaaataagaatcttctattgcatcaatgagatcccttctcatatctgcttcttttgacacaaataaacagccagattttctagggatattttccggcttacgctcaaagcaatagtaagagcggtcgtcagagtcataatcagtggaagaatcagaaccaggcttaagaatagtgtttttatgattggtagaatcgtcatctcttcccattttcaatccttctattgcataaatctgttttattacttcaagttcattatcatctaaagtattattagttttttgtcttttattatttttagaaacgacttctttccctgattctttcagttttgaaatacaatcattaataaatggtttatagttattatctaatatattctttaaaatacacatatcaaaaaccttcaatgatttcttaaaactttcctttatttcattcatagaaccacctaaatatttagtactttcaggagatttttgaataacttcatcaaaagcgttgattaaagctaaaaaagaagcatcagattgatcaacgggtaatttcaaagaattatatggatcaaacctttcattgaaaggcaatcttttgttaattttacctctattacttagatactctccaacaatgacatccaaatgagcatgaaattcatcatcatttaaaccaaaaattgattttttgttcaacttgttttcattggtaatttcataattgaacatttttggtctctctaataaaccttttattgataaagaatagtcatttccttcgttaacttcatataaaagttgagaattcttgagaaagttatcaaggaataaaaaccaaacagcaaattcgcaacttttctttgaaatattcatttcatcacaattctttttagtaatagcattaattatctgaggatattttgtttgccattccgagaaggcagcagatggagattgaatagtcttgattcctgttgaatggtttgtaaaacatttagatgaatttctaatagatcttagaaaatcacagataaataggatttttgcaacattgatttcgtgaatagtttgacaagatgaaaagattggtttcttaacattgtctaaattgatatcaaagaatggagaaaatatgaaatattcattcttatataagtcaaaaaatataagcataattatattcttttcagtttcagaataaattggaaaaactaatgtagttcttttctttttgaattttgttgacttacaatataaaataaattcttttaaatatttgtttttaagtaaggattagatcgtcggaatcatattcatcagggagtaattctaatctagtttggcatatttcaggatggaaaaaatatattaaaccatgatttgaagggtttggcagaagactttgaagagatttggctaaacataaaagaaatacaatttgtgcaatagaatcatcgatagaaattacctttatatccttaaaggtgaaaaatggaatatcatatcgtttttcataataagaagcatcggaatacaaatccaccatatcaattgaagcgtggtttatgaatgatataacctatttagttaaatacatcagcaataatacaatttccaatgaaaagaagattaattaattaaattgaaaaaagaagcacttttaaagatgttgattttctgtatgtttaggttcgctatattaacatgattcatgtaggttttcaatttgatcttttcaaagtgttttgatatattacttctttagtataatacagctgtttcataactgttttactgtaggtaaatatgtaaatactacaccattattaaatattatactacaaaaaaatggtttttttagaaatcaaatttatcattaatctacatcttaacaaaatcattcatcataacttcttctacgtgcattgtttttatcatatatcctcttcactacttggtgattcaaaagagtatagattttattaggacgccagttcccttgttctgcaaacttttcttctgaattcttaacaattaatatctttttcttattgtacatatttctatgttgttgcttccacttagctctgaaaggagggagatcaagaaaataatgaacaagaaaataaaacacttttctaaaatactcttcttgaatataccaactatcaaccatacgagaaacaacatcaagtaaatttggtgagcacatcattaagttaggaccaccagaagtcttaacaatcatacctgtctttaccaatttcaagtcttttaaaagtgaacatctcaaataaatccatttgcttagaagcttactttcaattcctgaaaacatggattcataattttgtttaaaattcccattgaacaattcaaattcaaaagaataaatgtaaggaacaaaccttacatctgggacgggattcaatatataatacaaaagttcatccaattgttcaatttcgtaatctctcaggtctttattatttatatcaattgcattgattaaaagcattctcactttagaatctgaatataaagtgcaggagggaacttcaatgggagtacgagatggagcagtggttagagcatttgatgatgaactacatgaagtactagagggtgcattgtttggaacatcagcaggagtactagattgattactagatgatgaagcgtttggtggagtaatagatggagctttggttgatacattgattgatgtactagatgaattactggctggggttgaactaatggatggagtattggttggaatactggttggagtactggtcgtaacattggatggagtactggatggaacattggtcgtaacattggttggaacattagtttgcttactaggttgaatactagattgaatattagatggagtactggatgaagtactgcatggagaattggctgatacatttgttgaaatgttggttggagtattagattgaataatagatagagttttggttgaaacattggctggagtactagatgaatcagaagatgtagaatcgggaacacccacaacattggcaatatcaagtttgttagaattgttagttacagtgtcaacttttttagagtcaacatttccgatattcaaactttctaactgattgttaagttctgatacatgagtttcattatcattcaaattattcttagatttaattgttttttctaaatcatcaaatttagagatacattcttttattaagttggcattaatggtattatttttaacacatttttcaaaaacctccattgatgcaacaaaacgttcctttaattctttcatagaatcacctatagatttaatattctctggagttttttcaacaactttattcatatttttgaaagattcatcatcattacttgattcatcaacgggtaatttcaagtaagatacttttttatgtgtatattttgcaatataatcaagaaacccatcatcatttaaaccaaaaattgtggttttatcacatttggcatcatctgtaatttcaaaattaaacatttcagatctctccatcaaacgttttagaggtgctaaataatattttccatctctaatttgatataaaagtggagaaattttcataaatttatcaaagaataatgtattaacataaagattgtagtctttctcccaagcaatcatttcttcgccttgttttttacatatgatacttatttccatagggaactttgattcccattccataaaagtatccactggagattgaactgttatgacttcttcggaacattttttaaaaactaaagttgataatctattaaatctgagaacatcacagatgaaaataacttttgcaacaattgtttcatgaggggtttgacaaggtgacgaaatcggttctttgacattatttaaattaatatcaaaaaatggagaaaatatgaaatatgtaaaaatgcgctttctgaaaaacccacagaaaaaccgaaaccaaaataagccactttcctcactgtaatttgataaaatacatacaaatcgcattcgatttgtatggacccatccagaaaaatgtcactggaatattttttcctggaattaattgcgcctttaattaattgcgtcttgtggtaaaccgagttcaccagcacttttgtcgatgaattttggatggtatctcctctatacatcctttttcagcttactaataaccctttaattatatatattaaccaggtttatcgtactctaagtaaaagaccataattaaaaaatactaattatgtaaaatgaataagtgtttgtaattattaaaataattcagtaacattagaaaatctcataaatttacccaaaaaatttattttatcataaataagtctatttctcaataatacgccagttttaattaaataactaattataaaccactaatagaacactgtccaaccattatcttgcttgaaaactaggtttatatttcaccgttgcttatttttttttttttttttttttttttttttttccagtcaacttctgtattactataaatttataaaagatactataaatatttttctctaaaataaatgctatataataaaacattcagtccggttaagggaaaggataatcctataaaacccttttgttatattgtaaaattaaatgaaaaatgaaaaagaacttaaagagtaaatgaactgataaagaaatgtaaataatggttaaattgtttataagttttgtgtgattattgtgaagtgttggaaaccaagaataagatggaagccttaccggtatttgaaatcccagtaagtatcttctataatattctcattttcccattgtaatatttcaggtctcttggcataagctaccctatgacaatagacaagaaatttaatgaaagtgtttataaatgtaaatgacgacgtttgtggtttttgcggacaaattaaaatagttgtggaaaattgtagagtatgttgttgatttgattggtttttgataaatttgaatatgtgggtggtgatgttgcattcattaataacatgtctaattggcgtcccgttgaatggaaggccacatagacagctactgtaaaatgtattgtttagtaatccggtgttaagtgcatataggtagtagtaatcttggggtttggtgaagatatgttgattgatgttgttaaagaagtttttccattcttggtcaccaagctgtgcattgttggcccaagttttagtattggtgttgatatagttgatgttttggtggagtttggaagatagatgattcaagtcctgataaagaatatttgaaggttgctgggatttatttttattcaaaaattgattctgcaatttggtttgtaggatattgttgtatgaggttatggtttgaggttggttgatggtgttgcaggtgatgtgatcagtcatttccgaatcttcagctggaagatttggtagtgtaactgtattcctccatgctgttaggtaggtttggagaggatggtagatgggtgtttcaggagatatatttactggtagaattatgtcactgctgagggaggtgtgagctggtggtgggtatggtcctagtgatggaggaatgatgttatgatcaaggtaccaggcttcttgttgatttcgttcatcaaaatgttgttgtctgtgttgctctctgaacatttccgagtatctgacggttatttttgatgggtggatggagatatgtgatgttgatggatgttttaactggttgttataatttgtggttagtaagtaccatggtgtaaaatgttgaagatgttgaagatattgggtgaaatgatgtgaggtttggatagtggttggatgttgttgatttagttgtattgcttcattaacttgagtttgaatggtgttaatggtattgttaatgtattgagagtataatagatttgattgaagattgattcggagaagttggggtaggtatggatgctttgcatccgactgggaaggatcgagcatgtatagtatgaaaaatgctcttcttccctgtagttgggtttcaagatccatcattccgaatcctccttgttttcttgggatgtaccaatagtctttgtttgtagggatttttggccatatttgatttctgactattgatttaacattgttgataaatgattgtaaggtgggtgcaggtataggatcatgttgatctaagaagtaaatggtggagaagatgtaagtgttaatcccaagtataattaggtgaagtggaaggtccatgaagcaaattcttcttaatcgagaggttagtaaatccagctttttataccagttggttttcatcaatggtactcctaggtaggtcggattttcggtgatggaagtcacctcaatatcatctgtgattgttgatttgatgtgttgaattgatgatgggttgcaatatagttttgttttttggtgattgagttttagaccacttatgttttcaaattcagagaaaatttggatggttttgttgatgtcgatggagtcttggttgaaagtgataatatcatcagcaaaagcctgactttttactttttttgtgaaattgctgagagtggttgatggggtgaatgtggttagagggttatagatgataccgttgatggtggagtttattttgtttaataggggttctaagcaaagattgaagatgaggggtgataatggtagtccttgtcgagttccattggatatatcaattttgggtcgatatatgaatttaccattgagaagttgggtgaaacctgctcgagattgaaacattattgctttaatgaacgttgatggaaaattaaatttcttaaggatggtggtgatgaagttgtggctaatggagtcaaatgcttttttgatatcaactagtaagagagaggcgtgtgatggtggggcagcattgatatagtttgctatgatctttgctgtttgtatgtggaggtggatatcccggtttggtaagaaagcttgttgatgtggtgatattaatctgttgaaaatgttcattgatcttctggtcaatgtatagttgtatagtctaaagatggtatttgttaaagagattggcctgaggttcccgggattgggttctttaggatcaaaatttttttttggtattagtttgataattgagttgaagattgatgattgagagttgacggtttgagatgcttggctggttgagaagtgtatttgattaatgaactgaatgatatgaagttttgaatattcccagctgtggaaccaggcagcatatgtgatgccgtctggtccaggtgatgaagggcctttttgatgtagtgctttaaggttgttaaagatttctgtttcttcaaatttggcattaagattttgtatttctgaatctaatagctgtggggctatgaagttggagaaaatggagttgaatagaatttctgtatctgtgagggaggtaatggagttgttgttgaatagagaatcaaaaagtttgtgtgacttttccattgtaagtttggaaaaggttgtttcatttaagaaatttttgaatcgtttgttaagttgttggtaggtgatgcataatggattagagttgtgtgatgctttcaaatttgagtacagattttctcgggttgattggtgctctgatggaagaagtctggagagtcttttgactttcgaaaggcggtgttgtatacatctgatgtagtggtccatgctgagaataaggttatcttcccatattggtgtaggttggaatatgaacttgattaaatcagggtgtttggtaaggtgatgtgggaatggagattttctatttgaatatagcgatgttgggaatgaaggagagtgttgatttgaagaatgctttttccttcgagattttggtctgatggtaagcattatcggaagatgggttgagtatggttgtttttgaagtagtttgtatttgatggagtggtgatggagtaagttttcatgaatgtaaaaacgatcaagtcttctattttcgcctgtggaaaagttggtggggaggtattggtattttgttggagtccttgatgttgcgtcaatgcagtcaaggtctcccatggtatggttgaatgtgtggtttggaggagtgttccaatctccaaggaagattggattggtgaggttgattgacttgatgttggtgttgaagtggtaatagaaatcttctttggttattgtggtgaggttggaaaagctgctggtgtgtgatgaagcgggcgcatatgcaaggcagatatgtatttcagtatcatcaaaggtcagtttgagatcggttatgtatcgattgtgagggcgttggaatgatttttgtatgatggaagtatcaattatttgattatatgttgtgtgattgacaaatatttgcactctggattcttcaatggtatttactggtctgaaatttttattttcaaacatttttagaatttgctctttagtggtggattctgttgtgatgtcatattcagtgagtgctatgatgtcggggttgatggtgttgatttgatttagaaaggtggccgacttggatattgatttaagtttttgtatgttaaataatattaatttaaccatttattatttaatttttgattttttaatatgtaagaaagaaactttggagttgaattgaaaatgaaatctgatttgaaatttgttatgaagtaagaaaaagaacgttctatcatgatagatagatatatattggtttaacaccaataattctatagaaaagcataaaaattattttccaacaaattccttgttagctcagtcggtagagcgttcggcttttaagaattctataagaagtcgaccgaaatgtccagggttcgagcccctgataaggagtttaaacatttattttttatatccccatttatttttacattgctctaagttattggatagatagcaagtgattattttttattttcaattaattattattattattattattattataaaagctattgtaaatacaaactataaaaacttgaaaaaaatctcccttacttattctaagatatgatcaatttcattctcttcaattaattgagcactaatttgacttctaactgcatgtaatttttcaggattttcattttgccattgtcttaatttataagtttgacctgataaatcccaataaatacctctaaaacttgtaaatataccatctctaccttcccataatggataaattataacaataaatcctgtaatgaaaatccaaataattccaactgttacccaacctgtaaagaatttttttgaaaaaatatattttgatccatacattggcattggccaaataactaataatgataaacttaatgcaatacataaataacctgcaattttagatgctcttttaagatgttgttcttcctctcttgccaattgaatcattttatcttcatgtgctaaattattaatagctaatgaaacattagattttaatggattaagtttaaggtctttatctttatcatctgaatcatcaatactttcaatatcgttattagcattaataacaccttctaaatctttttcaatttcagttgaatcatcaactcttttaattaattttaattcttcaaaatcaaaattttgtgatccaaaacataatgttaaaattggcataaagacagctggtgataataatgcaacaacattaccaattaacattggatcatccataaatgtattatcaacagtaattgcaccatacattgtatgagttgaaactaaccatgacataattgcaactgctgtacctaaaattggtgaaacaataactgaaattttatttggatgtttagaaattaatgtaaaagttgcaggtataacagcagctgagataataatacccataatttcataaagataacccattgaaatattagcataatataaacctgttgcaaaacctgacattgccaatgaaaagaatataactgtaaaatgtgaagtgaaaattaattttttaccacttgcatttggattaatataacctttataaatatcataagtaacaattgaagaaactgcaattaattcagctgacattgctgaagtaactgccatgaaaatcataaataaagttgcaactgcaccacctttacccattaaagcaacagcagctgaaggtaaaactaaaccagcagaaacttgatcacttgttaatctatttggataagatgggaaacttggatttgattcaagtgctaaacaagctaatcccatagttgtagcagttaaccaaggaattgcaaaccaagcaataccaccagcaatataaccaggtaaggcagcagcaggagatgaagcaattgctttattccaataaccattatctaaaaagacagtaccaaaattaccaacaatattaataacaaagaaaatcccacctgatcttgaatgcattgttaaataagaaccatttgcattaccatcaacaggatgatcaatacctgcctgagtaactaattcccaaactttaccaggagaacctaaaattggtgaagttgcataagttgtaaaagcaaaagttaaaataatgacaataattgcaattgtatgaatataatcagttaagaaagttgccttaataccaccaaataatgtataaaccataacaccgacagggaataagaaaattgcagcaactgtattcataccagttaaatcactaacagcagctgaaccaccagttaataacatagcagtaacaagtacattagttgcaaatgcaaagaagatgaaaacaccatgagcaattggaccatatcttgccttaataatttctaaataagtatgagcatttggagctttttgttttgctttaattgcaataaatgcaaataaaataatttgacaacaagcaccagcagcgtaaaagaaaggacctgaaataccatttttataagcttgagttgaagattgtaataaagttgcagcccaagtccaagatgagacaactgcagctgcaattaaaccagttttaacacttctaccagcagttgagaattcctccgaagtaataatttccttttgataacgacgtaagataaaagtagttaagatcatcccaagggagaaaaccatacctaaaccgacaataattgcataaccagcaccttgaggtaatggaatagataaacctggcatattgtttgataaatgattgattgattgttatataatctaagaaaaatttttatttagacacagaattaaaaagggaaggaaataggtttcaatttatacaaaactcggggataataataataattaaaaaccctaatttagtaaagcggcgtttattacacacaccatcacttactctttacaagataattggatgataggccagataataaaataataaatgatgaaaagaaagaagataataagataaagataaagataataagaaaaaataaaatccaagacgataagcgcatctcatttttcgggccgacttattaatcccctttttttacgccgttttgcattgtttgcttctttttgactttacttctttctttgctttcttttgacaatgtccgacaacattataatgtgctttgatggcaccgacaataccttcgggtctaaggatccttctaatatcatggaattgtacaaaatgttagagaaaaattcaattaatcagcattgtttctatcaacgtatgtagtgtaatgtaataattatcatctcgtagacatatactaacctgtaatatagctggtattggtattgatattgatatatcacaaaattcatttcaaaattcatctttcaaatcatcatttaaaaattcaattgatagtgcaattgctatttcaattgattatcatgtaattcaagcttatcaatatttaattaaaacttttaaacaaggtgataaaatttatttattcggatttagtagaggttctttcattgctagaatattagctggtatgattgaaaaaattggtcttttggataatggattagatggtatggttaaaactgcttgggaaatttataaaaattgggaacaatgtggtcaacctagtaataatccattgtattgtacttattcattacaattattcaaacaaactttttgtagatataatgtttcaattgaatttatgggattatttgattcaattaattcttgtggtatatttattgataaattattcccttatacttcaaatacttcaaatgttaatcatattcgtcatgctgttagtattcatgaaagaagatcaaaatttaaacaaaatttatttcgtttacatagttatttaccttcttttcttacaaataatgaaattacaagggattgtcaaagtgaaaattcaaatgataatgataatgataacatatcattaatatcacaaattgaaatgcccgatgatgataatgttacaagatctcatgatgtttctgttcaattctctaaaagatgttcaagggatatattggaagtttggttcccaggtgatcattcagatattggaggttgttggccctatgatgataatggtaataaaatttcaaaattaccacttagatggattttatcatttgctttaaaatatggtgtacaattcaaatcaaatgcattggatgaatttaatttaaaatttacctccttaaattcagcattaacatttcaacatgatacactttcattcaaaggccataaatatccttcatatataagtccttattgtatggctaaaaatatttacgatgaagaaaatcaaaagcatgataatgataatgataatgatgaaaatgaaaatgatattaataccaatcttagtagtaatcctaatgaaacacatgacagaaagaagaagaatagaaccaacattaaaagttcattattccctgatttttctaaatatatttcaaaacctgatttaagaaatgaatttaataaaattgatacatttaaaggacatggagattcaagttttattaatacattattttggtggattttagaaattataccaataggatatagaattgagaataaagatggtaaatggagaccaatttattggccaaattttggtgaaaagagaaatgtacctaaaaatgcaaaagttcattggtcattactttggaggattaaatttattaaaaatgttgatatatctcatttacctgaagtttataagaatcttgaaaatttaatattaaatgatgataaagaggagaaaatgtttagtgataatttattaacattatcatcatcatcaccatcagataataatcaaacattaatattaagagttgaagatttagttgatttgaaaacaggtattcttaaaactgatattcatgaacttttaacaagtcatttaaataccaatactaagattaaacttgatattgattgggataatccacctaatgaattgattaatctccaataagtaattcaattccttcctttcatagctagtattaataccatacgtatacatatatcaattaatcgattgttttataagtaacataagttgaaattttatgattatttgttgttaaattattatattcaacactctctgattcattttcatcaatttctttaaaaaatttagcatcatcccaattattatttgattttatatcaccaattgtatgaacaagtattttaaaagtttgaggagttgttaaaacaggtaaaaaagtaattgatgaacttatttgtttaataattgattgaatttccaattgaatagtttctaatgattttatagtagtagtagtcgtagtatttgtattattattataattattattattaatatctatatgaaacatccatttttctgtaattgaatcatcttcctttgatactattaatagagtaagccaattaattgattgattaaatatccaattatttaattgtttaataattaatttaatataattaacaatttcaggattattagaatatacaacatttaaaccaaattttctaattactttaaattgatcccttgaataaatctttctttggaaaaggatattatgaatacaaatttcaaaataatcagagacaatcttacttgaaccattgatttcaactgtattattagagttgttcatccttgttcaaaagaaagaaaggaaggaagtattatggtggataatggaaattattgttacgtaattaatgtaatgtcttctttagagtaaagacactacttatatcttcttgttggataacaagtgcaattacaatttagaatgtcatttgtaagaggatacagtcagaacagttcattcgaaagtatagtatgttgaaataattaaattaaataattaaattaatacaataagaattaaaatactaacattatctatagcatggtagggagaaatcagctaaattatcagaaagtgaagcattgaaaaggatggaaatagagagaccaaaagttgacaaatataaggaattgaatgaattagtattaaatagtaaattgaataaaatatataataaacaatcatttgaattaattactaaattattagaaattaatcctgaattatacactgtttggaattatcgtaaagaatatttaattaatgaaataaagggtatgaatgaaataaataaacatgaaatattggagaatgaattatattttgtatttaaacaattaaagaaatttcctaaatcttattggatttggaatcatagaatttggtgtttaaaattagataatttaagtgattgggaaaatgaattaaaacttattaaacaatttttaacagttgattcaagaaatttccatgtttggtcttatagaagatttataattaaatgtatgaaagatataagtaaagatagtgatataattgattttgaagaatttaaatttacaacaagtatgataaataaagatatttccaattattcagcatggcataatagatcaaaattaattgaaatgttatttaataaatcaccagtattatcgaaagatgatgtaggtgatgaaaaattatttcaatatttattaatatttaataataaagatataaatcagttcctaattaaagaacttgaattatttaaaactgcaatttatacagatcccgatgattcatcagtttggttttatatgaaatggcttataagtgaatattttcttaataaaattgaaaatgatgaaaaaattgatataataactaaattaattaatgatattaaagaattaaatgaattagaaattgaagataatgaaaatggtaatgataataaatggtgtttaatatcaattgtttatttaatgaaacaattatacaaaatcgataagtcattagttaacttagatgaatttaataattatctaactattttacaaaaaattgatccaatgaaaaggaacaggtatatagaattaaacatataatctaaggaataatatttttaccatcgatttccctaagataagtttgtttattatataaaaatcttaaactaccatttttagctatatctgtatttcttggttgaaagaataaatctttatctaatctatttgtttgtttattcgtactctttatttgattattaagttcaatctttatattaattaataaatcagttaattttttatcatcaattataatatttaattcctttaatgaagatttgaaaaatgttataccaaggttatcaattaaataaccaaataattgattaacaccatttatattaaatgaatcaatatccataatcatggggaatgattttttaaaatcaatatttaaattaatatcagattttaattcatttaataataatgttgatgctttaatacatattatagcattataatgagcaggatattgtaaaatcaatgatgttaggtataaatcattcaataatgaccaacttaaatatcccagtaagtcagatgtacttttactttccgtactttcattataatattttaaaaactttattaaataatcttcaattaagaaatttctaaaatcaaaactttgaaattccaatattttacgttctaaacttataattattttcttattatcttcaacatcattatttgtcaaataaaattccttaattgataaagcttcacttataacaacattaattttctttataaaatcatttaacttcaaagaaataaaaagacaagctaatccaacttcaaaatgtaaatttgaatattttttataattattattcaatatgtaaaacttttgatagaaataacttgaattttgtagtattttaataggtaatttaagtttaattattaatttaattaaaacttgaaatacatctcttgatttttgtttaaaatttttaatattatgtgaaaggtctttattattgtttatcataaaatcaatttcatccaatgtaaaatacggtttcgatagttgaacatatgtccccgttggatcctgtatacttgtcattgtatagatatcccgtcctaaataaagagtaaaaacacatgtatagacagactgtgaaataatttttgatatttgaaatttcaattctcattatttaacattacgtacatggaagatccactttgagtggcaaagtttctttaagttctttcttttggtttatttcatttcttttcattcagtacacaaccacaatgggacaagacgcatcaacaccaggtcaagggaaaaagaagggagtagataagaagaaggagaaaccaaagtatgaaccacctgcacaaactagatcatttggtagaaagaaaggtaaaaatggtagtgataagaatgcaaaattaccaaatgtattacccaatacgagatgtaaattaaaattattaagattagagaggataaaggatcatttattacttgaagaagaatttgttattaatcaagaattattacaaccaactaatgagagacaatttgaagaaagagagaaaattgatgaaattagaggttcaccaatgtcaattggtacattagaagagataattgatgatgatcatgcaattgtttcatcaagtagtggacctgaatattatgtttcaattttatcatttgttgataaatcattattagaacctggatgtcaagttttattacatcataaaactgttagtatagttggtgcattacaagatgaagcagatccaatgattaatgtaatgaaagttgataaatcaccaactgaatcatatagtgatattggaggtttagagagtcaaattcaagaaattaaggaaagtgttgaattaccattaacacatcctgaattatatgaagaaatgggtattaaaccacctaaaggtgttatattatatggtgcaccaggtactggtaaaacattattagctaaagcagttgcaaatcaaacaagtgcaacttttttaagaattgttggtagtgaattaattcaaaaatatttaggtgatggaccaagattatgtagacaattatttaaagttgcaagtgagaatgcaccatcaattgttttcattgatgaaattgatgcaattggtacaaaacgttatgattcaacatcaggaggtgaaagggaagttcaaagaacaatgttagaattattaaatcaattagatggttttgatgatagaggtgatgttaaagttataatggcaacaaataaaattgaaagtttagatcctgcattaattagaccaggtagaattgatagaaagatattatttgaaaatcctgatgcatcaacaaagaagaaaattttacaaattcatacaagtaaaatgaatatgtcaaatgatgttaatttagatgaaattgttaattcaaaggatgatttaagtggtgcagatattaaggcaatatgtacagaggcgggattattagcattaagagagagaagaatgcaagttaaatttgaagattttaaacaagcaaaggaaagagttttaaagaataaaattgaagaaaatcttgaaggtttatacatgtagtttatgtatttaaataagtacaatcttaatataaagtaaataactattctactgtaatgtaatgtaatgtaagaggtcaatacttacgtaatatttaatattaaaatagaaaataatttgttatgtaagggactggaaagtttcaattaggtattttcttatttaacaagagtatgaagagtttcttaaaacgacattcagttgatttaacacgtaggaatagtaaaggggaggataatgataatgaagtgaagttggatattaaagatttaaaaataacagacactaccacagatccatgtgaaggattaacatttaaagttggagttagtgagaataagaatagtaaatatagacgtagtatggaagatgttcatacatatgtttccaacttttgtgatagattagattgggggtattttgcaattttcgatggacatgcaggaaagcaaacttctagatggtgtggtagtaatttacataatttattatttgaaagtataattaatgataaatttggagatttaagggataatttaaataaaagtttccaaaaggcagatgaaattgataggagatgaggaaggtattggtaatagtggatgtacagccgcagttgcagttttaagatgggaggaagagaatagagggagagggagaagggatgaagaagaatactgctaatgataatgatcatattgattataataaacataaaaggatattatatacagccaatgttggagattctagaataatattaaatagaaatggtaaagcaattagattaagttatgaacataaaggtaatgatttaaatgaaagaagaagaattgaagaaaatggaggaattataattggtaatagagttaatggtatattagcagttacaagatcattaggtgataaatatgttaaagaatttgttattggtaaaccatttactacaatgattgaaataataccagatatggataaagagataataattggatgtgatggattatgggatgtatgtgaagatgataaggcaattgaattaattaaaggtattaaagatgtaaatgatgcaagtaaagtattggtagattatgctataagtaatggtacaacagataatgtaactgtaatggttataagattaggtaaagactaggctgacgtaagcaaacagtcgatgcgtcggtagaactgatgacataatcacagacagacgcgactacaattacataatcgacaaattacattacataatcagcattacgtaatacaaaataaaacacggaaagacatattaatatatccggccttatataaaatttaaaatttaaatttaaatttctcactacttattaataatggaaattcaattggacgaaaattgcatttattcactttcccgagtcgcaattgtagtgtagctgattaattggtggatattctggggtatttgtaatttattttgtagatttatattatcatttgctttttattccttcatttcatttatcaatcaactatccattatgctttcattacaaagaagtataaaatcagttacttcatcaactacttcttcaagtaagagatatttctctcaaacaaataaaaacctccaagttataaataaatttaataatttaaatggtaaagaagcagctgtttcaatgtcaaaagaatatcatataattgatcatgaatatgattgtgttgtcattggtgcaggtggtgcaggtttaagagctgctttcggtttagttaaagaaggttttaaagttgcttgtatttcaaaattattcccaactagatctcatactgttgcagctcaaggtggtattaatgccgctttaggtaatatgcataaagatgattggcattggcatatgtatgataccgttaaaggttctgattggttaggtgatcaagatgcaattcattatatgactagagaggcaccaccttcaattattgaattagaacattatggtttaccattctcaagaactaaagaaggtaaaatttatcaaagagctttcggtggtcaaactaaagatttcggtaaaggtggtcaagcttatagaacttgtgcagttgctgatagaactggtcatgcccttttacatacattatatggtcaatctttaagatatgatactcattattttattgaatttttcgctttagatttattaaaacataatgatgaaattgttggttgtatagcttataatcaagaagatggtactttacatagatttaaagctcataaaacaattattgcaactggtggttcaggtagagcttatttctcttgtacttctgctcatacttgtacaggtgatggtactgcaatggtttcaagagctggttatccattagaagatatggaatttattcaattccatccttctggtatttatggttcaggttgtttaattactgaaggtgctagaggtgaaggtggttatttaattaatagtgaaggtgaaagatttatggaaagatatgctcctcatgcaaaagatttagcttgtagagatgttgtctcaagagctattacaatggaaattaatgcaggtagaggtgttggtcctcataaagatcatatgttcttacaattatctcatttacctgcttctgttttaaaggaaagattacctggtatctctgaaactgctagaattttcgctggtgttgatgttactaaagaaccaattccaattataccaactgttcattataatatgggtggtattccaactaaatggagtggtgaagctttaacaattaatgaaaagggtgaagatgttgttattcctggtttatatgcatgtggtgaagctgcttgtgcttcagttcatggtgctaatagattaggtgctaattcattattagatttagtcgttttcggtagagctgttgctcatacaattgcaaatgaaattaaacctggtatgccacataaagaattacctgcagatattggttttgaatcaattaaaaatttagataatttaagaaatgcaaatggtaatacttcaactgctgatttaagattagaaatgcaaaaggcaatgcaaaaacatgttgcagttttcagaactcaagataatttagatgcaggtgtaagtgaattagaaaaaattgaacaaaaatttaatgatattaaaacaactgatagatcaatgatttggaatactgatttaactgaaactttagaattacaaaatttattaacttgtgcaagacaaatttctttatcagcagctgctagaaaagaatcaagaggtgctcatgcaagagatgatttccctgaaagagatgatactaactggcaaaaacatactttatcatggcaaacaaatactaatgaacctgttaaattagattacagaaaagttattactcatactttagatgaagctgaatgtaaaccagttccaccaactgttagagcttattaagagtttcttgtcattataatttaattataatttaattcatgtttttattttttcgataacccccctctacctttttttagtattatgagttttatgtctttattaagtagtaataataatactctttatttataaatacacatataatctatttattattcattaaaaaacttaaagtaactgtaattaaaattatgatatacctaagaaaaatttctcaatagaaaaaaaaaaatattttgaagatcaattggatgatggatctgaagaaggttttccatagtagaattatacactacaacacttcctaaacataaacgatgtttcaattatcattaatatctgatttaatacgaattccaccacatttatttaatttaccaagagaaattgcaataaagcaagaattaaatgttaaacattcaaataaaattataccaaaattaggtttagcaatttcagtttatgatataattgaatatgattcaggtttatttaaaccaggagatggtgcaatgtatattcaagttacttgtagattattaatttttaaaccatttattggagaaattataactggttggattgaaaaatgtacaattgatggtataaaaattaatattggattttttaatgatattttcataccaaaggcattattatttgaaaatagttcattctcaattgatgaaaatgcttggatttggaaaatggatgatgatacaacactttatcttgatgttaatgaaaaaatttattttagaattgaagaagaaattttcactaatgttaaacctaaaggtccattaaataatgataatattaaaaaggatgatgatggtcaacaaaaggaacaaactcctccttatgcattaattgcatcttgtcaaactgatggtatgggttgttgtagttggtgggaataatttactttattttatattataaaaaaaaaactcattgtgtacattaaattatattaaaactatagattatattataagatagtagatagtacttttactaattatattgcatatacctacttgttgaagagaatttcatattacccttaataactttctcaacagcatctaaaaagtccttttcagttgcaactttccttctagctctaattgcaaacataccagcttctgtacaaacagatcttaattctgcacctgttgcatttggacacattctagaaattaattcccatctaatatctctctcacatgacattgattttgcatgaattttgaaaatatttgctctaccttctaaatcaggtaatgaaaattcaacttttctatcaattctaccaggtcttaataatgcaggatctaatgtattaggtctattagttgcaaacataactttaatattacctcttggatcaaaaccatctaattgagtaattaattctaacattgttctttgaacttcattatcaccacctgcaccatcatcaaatctagcaccaccaattgcatcaacttcatcgaaaaatataatacatgctttctttgttctagccatttcaaataattctctaaccattctagcaccttcaccaacatatttttgaactaattcagatccaataactctaataaaagttgcatcagttctatttgcaacagctcttgcacataaagttttaccagtacctggaggtccatataataatataccctttggaggatcaatacctaatttaacaaatctttcaggtgataaaagtggtaattcaacaacttcccttaatttttcaatttgttctttacaacctccaacatcactatatgtaacatcaggtttttcctcaactgtcatcattgtaacagttggatcaattcttggtggtaaaggtaattgaatttcatattttgatctatcaactccaactctcataccttcttcaatatcagttggtgaaactctttcacctaaacctacaacaaattttgcaatttgtttaatattaataacatatttagatttttcatcaatttcttctgtatcctctacatcatcagatttaataattttagtacatcttgcaacttgtaatggttgttcatcattcattcttttacgatctgctgcaacatcccaaagatttggatttgataaacctgtatcactctcttcaatacccattttttccttaattttattctctaaatcctttaaatctttctctattgatttaatagaattactatatggagctgcactataagttttcaaaacttgaatatcatcttcacttaatggtttgatctctatatttttatcatcttcaacatcatcaattggtttcttaaatttctcccagttttcattaggcgccattatgtgtatctatatatgtttcctgatttatatctatttgcccttgtaattataaacctcttataacttaaatgaaaagcacctatacctcagggtggcaataatcattatattgaaaatgggattcccaggtctatttcattttgtattacgcaatcgacgcgacttccacaaagagtagctatttattacccttttaggcaatgttatttaattgtatctttaattacagtatctacacagagtttatatcatatataactagtttaaaactttatggagtaaacttgcacccttatttgattcatcttgctttttgatgaatttattttgtttctttaatgcattaataaattccattccaattttatcctttggatattgtttaaatttatcagttaatgcaactaatacaaaactactctccttattagaaatccagctctctaaaactatcaacatctttaccattatcaaatatttcttcaacaaatttaattgcaaatgataatcctaaattaatattttcaatttcatcaatagttttagtttctctattccatttaccaccttgaattaaagattttaataatcttggtgtatatgccttgttaataagatgatcttccttagttaaatctcctctaacacaatcaataattgtatcaatcgatttatttcttaattcatcactgatttctgggaatgtagtattatataataattcttgaacaaattgtgcacctatattttcctttaataaatcatatggattttctaataatgttttataaaatactggtaagaaaatctttaaaatttgatttcttctttcttcttctggctttttagatgtttccttagagagttcaacatatttttcaatatcttttaaaacatttggtgaaaaatatgctttatctaaaccatttaataaataaataaatggtcttcttgaatatttattagttaaaacattttccatatgttcagaatattctgaaaagaaaactttttgaactaaaacagtatcatcagttgtcataaagataatttgtaaaactgtttgaccatgttcattagttgctaatttttctgcatgttcctttaaacttcttaataataattttctttcctttgcagttgctcttgctaaaactgtacatgcaacttcacaaccttctggtgtatgtactaatgatgcaaattgttcagtaactgcttcaataaattctttcatatcttcaccttccataatttgaacaaattctttcattgcagcatgtaaaatttgaaatccaattgaacctttctcaattgatgccttaatagtaccaagtaaattacctgaaattaatttcttcttctcttcagattctgcacaaacttcagcaattgttctcttatcattttcatctgtaaaatatgcatattgtgaaccccaaaattctctaatcatttgattcctttgttgagtagttgcatataaaacaaataaatcttcaacaacatatgcaccttctctatgtctcattaattttcttaatttaccatgtaaacctttaataattaaagctcttgaatcttttgatccataatgaagtaatttaactaataaatatttaccatatgcagatgttgctaatttataataatatggttttaattctttacatattaaatctcttctttcctttgaggaatatttaactaatgtttgaacaactcttgatgcatcatgtttcataactaaatcaccaaggacaccttcacaaagagaccaagtttcattagctaatttatctctaacttcctttggtaatggaggatttttcactcttaatctttcccataactttttaattctttcaacttctacacctgattttctcttattctttctttcctttaaaagttttctttgttcttcatgttgttcctttgaagttttcttatcaggatcgtcatatttatcagatgattcatcattattgtcttcattatcttcatcttcaatatcttcatcatcatcattttcgtccatcttgtctaattcatctaaatcatcttcagattcttcctcagattcagattcatcatccttttcactttcatcttcacttgattgttcggatgataattcctcttctgaatgttttgaaggtttactttttttactggccttagcactcaagctctcagcctttctcttaccacctttcaactgtgcagccatgtcttcacttgatctaccaagggaaatacaacaagaaacaaaaaccaaaggaaaaaatcttcatgaaaaaaaaaaaataaataaaaaaatttcaactgaaaaattatcttattgagggtctcatatatagattgtaggggtgatatcgtaatagatgttagagtatttaagatatttatgacattatttgacaggggatgaaggtggcaatagagggatgctgtcatggatgtttggatcaaatctataaacgattgaataagaagaaagtggaattattgattatttgtggagatttccaaagtattagaaataaagcagatttacaatcaatgagtgtacctgataaatataaatcaatgggagatttccaagattattatacacttaagaaaaaagcaccaataatgacaatttttattggtggtaatcatgaatcatcaaattatttagaggaattaaaatttggtggatttgttgctccaaatattttctatatgggtagatcatcagtaatttggtataaaggtttaagaattggtggaatttctggtgtttattggttacctgattttcttaaattaagaccaaataattatcaattcccattacaaaggtcaaatatacgttcaatttatcattattcaatggaagattatattaaattaaaattattaaatgtttctcctaaaatgattatgttatcccatgattggcccgagggtatctataattatggtaataaggatagattattggagaaaaaacctttctttaagtcagatattaaaaagggtgaacttggaagtccatttaatatgaatttattaaagaaaattcaaccaagttattggtttagtgcacatttacatgttaaatttactgctatgttaaaatggggagatgataaggctaatgagaagaaaagaattattaatgagaatgaggtaactttggaaagtaagaaagttaaggtagatcagaagaatgatgatgaaatagaattagatataagtttagatgataagaaaaatgaagacgagatagagttagaaataagtgtggatgcaaaagataagaaccaggatgaaatagaattagatatatgttgtgatgatacgactaacactgatgaaataggaaaagactcaaatgaagataccaccacacctatcgaacctacaatttccaatggaaccaccaaattcctagctcttgataaatgtttaccaagaagagaatatttagaaattatggatattgaactaacagataaagatcatatttctacaaaatttaaaaatgaaccattattctacgatgaagaatacatatcatctcataaagttattaataaatataaacataaacttgaaaatatatcaattgatgaattaaataatgaaaattcagaattatttaaggaatttcaatcattaaaggaattttacttgaaggagtataaaaatcttgacaggaagtcatatagatcattatttaatatacatattaaaggatttgtacagactgcgttaccaaatgaaaaaattggtgaacttaaggtaaatccacaaacaactagttttatatctaaatttgaataaataattaatataaataaattataaatattttgctatactatttacagactcccttatttgttcattatcacttttttgaaattgtaaaatactattctttgagtttttgaaaactgataaatatgatgtggatgagtttgattggaataagtttgataatatatccaaactataatatatcaattcatctaattgatattgattaactaacacatcatttaaattattacaaaatttttcatttgaaataagtttttcagaaactattgaataatttgaaacttttgcaaatatttgtaatacacaaatttgtgaatcaatactatttgaattaattaaataatttaaaattttaaaattttggaaattttcatcattattattcattgaactccaattaaataattttgcaatacataatggtaataaacaaatttcatttaataattttaatgaagaaaattgtaatttatcattatctgaggtaatcatattaataattgatttaaaaccaaataagaaaacagtttcatttattttattaaaatttaatgaacaaatggcagataatccaatatatgcgtaataaatatcaaatgatgtgaaaacttgtccatttttctttaaattactaaatggtgttttcatttcagttaatgcagtaccattatcaatatctgcttgaactataatttcaagcaagaataatgcaatagataaagtaatttcttcatccttattttcatcatcaaataataaatcaaccatttcactaattttcggacttgataatgatttaattgctaataatctatattctaaatctttctctgataattgattattttcatcagttaaatgaataaatgttttatgattatatttaatgttttgtgatgtacctattaaataagttgttaaaagtttaataatttgctttatttcaacaatataattttgatttatattatcaattgtttcattttcatttataacaatatcagggaaaataacattattcattaattttagacattcaccaattaatcctttagaggattcgattgatttaaagattttaaccatattttgtgagaaaaatttaatcttaacaagtttatcaataagtagtgtaatatgattaatatcatcgaatttctttgaattgtttattttagcatttgtataaatatcataattacttatactattagaatcttttaaattcatcattgaagattgttgaattttcaagattctattaggtattgttaaaaatgataaaattgaaattataccatatgttgtatgatgatgattatttaataatttaaataatttatttaaaagttcatcattattccttatttttcctcttatttgaatattagtaactaataatgataatccttcaattgatgtaaataattccaattttatacttaataaaatgatttcaagtaagttatttaatgataataaagttgaattatcttccaaaacttcaggtttaattaatctccaaagtttaatagttattgtagctgcataacatttagtttgtaaatgattttcaatattatttgataatcttaaacattttaatgattaaattgatataaacagttgcaataattgatcttgacatttcatcaatacatgcatttgaaaataattttaataatttattgatatttttaattgattgtaaattattcaatgattcaatttcatcattaataaaagttatttcattagttaataaacttataaatgattgattcttagtgaaaatttcacttgctaaaaatgaatcaattgtgaaaatatttgttaaaattatgaaaattttatatttttcatatttagttctcttgtaaatcaataagattattaatgttttcagttattgcaatattgaaatttttattaaattgttttatcctgtataatcccattgttgcctcaactgataaatcatcatcaaatacgagatattccattaaataatgacaaattgtcgatatgtctacattattatcttcatcatcttcaccatctccattaccaagtacttgaaataatttatgaactaatggttttgaaatttcccttaaatgaatagatttttcaacagtatttagtttcccaatagttactaaatcttctttaagaaggtttgcatactcttcaagttctaattgtgacatctactccccataagaaagaccaagtgaatgatccataacaaaatcatgattaacatgtaaattgttaacgcggtttctataagggtccattttatatatcataatttcataatcataatttattcatttaagtaaatatatatacaatgtaatatataaatataggtgatacattcctataaattaaagaaaagaaagaacgaaattattaatgaagtgattgaattgctgaacgtaattcaaattcatcattaacatcaaaaggtagcagtttcactacgaattgaatcaattggttttaaatatttttcttgtcctagcatgcttctctctctgcttcttctctagccattgttttatctaatgttccaagtaacagaactaagaaagacgaatgcacagaatccaccagctgctgcaatacctgtaaatggccaaattaaattaggatcaactaatgcaccaggagacaccttcactaatagcacttgaaattgcactgattaaataaaaataatgcagtaactaaacctttagcattatctggagctctagtatatgcaatttcatgaccagttgtaaaacagaaacatttacctaatgcacataaaccataattaataataacataccatgcagttaatggtgatggttgatcacaatccgttgcataataaccacatggtgaagtttcatagattctccattgtaaaatagctgaaacggcagaagctaatgcaccacacataaaaccaacgaagattttataaactggcttaaagttaatattccattttcttaataatggataaagaccaaaatctaagattggaattgcaacaacaataacaatttggttaaaatttttgaaaaaatcatttggaatacctttggatgtcattgcacctgcttgtgcctttaaagtgggacctaaaccggaatcacttaaattaaagataacccaaaatgagaacataacacattgagtaaagacggatttataatcatcaacttcttgagcagtccaatcaattggagtttgtttctctgtattttgatataattgacctcttgcttccatattttcaggataagcatatgcccaaaattgtttattccaaattctcttgataaaattacccttaagacaaacataaacaactcttaaagctttacctaataatgaaccctttggacgttcaggtcttaaattaggacgaatgaataacattgcaacaacaacaataatatacataataccaggacaaaggaaagctaaccaataaccaacatctcttgcagaatacgatgatgcaatttgtaagaatgcaccagtattgattgaccaacagaaaatcatagtcaatgattctattgaaccatctctatcaacataaacggtttcaccatctggcatctttttcaagacgttttgtctgtaaggatattgatcaagcatgaggggtaataaattagccttaatgaaaccagtacagacagctaatgaaataatacctaaagcagttggtgccatagccgcttgacctttagcaataactggaggtaatgcagcaataatgaaaagaatgtgtgagacaattccaacccaaataccaatcatgatagccttgaatctacctaatctatcatcagctagatacccaccaactaatggcataacaaaagctaagaattgtaataacataactaaagcattagcatcttgtaaacctaaacctaatgcaccggcattaccatcatgacctggcatgactctacctgttttggaaccatcaggtaatggtctcataatgaagttcgtcaagataccttgaacaccaaaataggaacctctttcagcaatttcaacaactaaaatcaacatagctgcaagtgttggtcttgttctaataattctataattaaatttatcctcagcagttgcaacagctaatcccattggattatattcatcggcatattctggaatatattcacgattatctaaaatttgataatctataccaccaataagatgttttttaaaagaatctgaatctgaatctgaatctttatctttactttcaatattattattattatttgataatttaattttttcaacattattaatatgttcattatctgaatctattataacattattagcttcatcaataaattgatgtttctctgtagaatttttctttgaggagaatctatccgttaatttggataacattttggatagtttagtaagatgaaattgaaagaaattttttagaaataaaaaatatgatttcagaataaaagaaatttatcaaatgtaaaattatcaaatgtaaaatgtaaaatgtaaaataaaaaaatagaaaaaagaaaggaccttagagtgaattgaataagaaaattaaacggggatcaaaatattaaccatagtgagcatagtttatctagaattgcaataatgatatgtaatcaatctaccgaacaataagattaatcatcagaataagaataatgaaaagaatttagaaaaattgataaactgtcaatataatgtgtcaatgccttggaaaaaaagaaagtccgaagagaacaatggtgtcggttttttaattattaatcctcgcgcatatgcactgcgggaatctggcggttaacaaacttaatttttttttctcgtatagaattataaggtatgataatgttttgtatagtatttgagcaatattgtaatataatctatggaattttagaaccagtatatgaaattaagtgaacaagttcatttgtatttgtagaacagaattttcgatgaaagcaattgtagtacttatggtattcttgtaatgatgcagaaatttgaagcagaattgaaatgaatctataatttaatgtaatcttcccttttgttgaaaactggatcttggaagagtaaatctttttaaggtcgtaataatttttaatatcctaatgatttattgaaagtggataattagtgagtgaatgctttagtaaaggatttttcattaaagtcagaactttataaaaaaatttgattatttgcacataatgggtacgtttttgttgaagagtcagatcgatatatactaagttacatgaacaaatttttagagactcagtgcaaatatgatgaacgaatgaataaattcatattttgaatgaataatttagtaattgattagctgaatagttgggatataacgttttgattgaatgatactattggggaaactaaagactttgaaacttcgattcaagaagtaaaacaagcttgattatttcaacttttcatattgataaaacgctttatgtgaaagctagtataatttattgtttaataaaatttgccttttgattaataagcgttggtatccttttaaaactcttagaatttatatcaatgggatgaattgattattttttgttgaccaaactaattcttacccttcaaaattgtcttttgatgccataacttgtgatccatattcactagtacgtagccaatataccaagatttgaatgatttggtattcatagattgtgtcatatcttgtattgatttattgaaaataaagcatctgagtgtgcttaaaccaacatttaacaccgttgttaaaaaaaacataaattgaattgtgtaaccatgaaatgacttaatttactaaaaaatagtaaaacttatcagattttgagatatgttaattgaaaatgatattgaaaagaacttttttaataaataaaagtagatattcggtttcagaatgaatataaagtaaaatttgtgttcaattggtctagtagagacctaagttgttcttttctgattctgaaacataccatatttttccctagagatatttgattgcctaatgtgagattatctcttctttgaatttgtgcctaatgttataagattggaataaaaattaaaataaaaagtaataaaatgtttgtcattagtttgaataaattcgggttttgaaattgacatacttcttattgaaaacgttataattatattcttaatgaaatgaatgtaataaaaatatcttcaatgaataaacttttttttttaattgttaacctttgatttaattgttgaaaatgatattttgactctgttgaataaaagatatttccggaaaaccaacttaattgaaaaagcaaaacttgtttgaataataaactgactttgaattattatatgaatattattatcataattgaatgattatcataataaagtgacgttaaaaaaaattgtctgtatttctgtggaacattttgaggaaataaaatctttttaaatgaaaacctctattaagaacttgatatttttaataagttttaattttaaactaaattgccatcttgatatgtagcttgtggatgatcctagataccaaatgtttaaatataaatgtttagttaacttatatggtagttcttatataatgtacagagtaattgatgttccattgtattgatgtgatgtccttatgaaagtctaattgaacattgtagatgttcaatagctattcatttagagttcatatattcgttgggtgttcgttattcataagggactattcctaacttcacattgtggtacaggggattaagacctctatttatagttgtaggagagataactgtctttaccttctaagcatggtaaatgtgtgattttacatataagggtccattttataacataatttcataatcataatttattcattcaagtaaatatacaatgtaatatatataaaataggtgacacattcctataagttaaagaaaagaaaagaaattattaatgaagtgattgaattgctgaacgtaattcaaattcatcattaacatcaaaaggtacagtttcactacgaattgaagcaattggttttaaatctttttcttgtctagctgcttctctctctgcttcttccttagccataactttatcaatgttccaataacagaataagaaaacaaatgcacaaaaaccaccagctgctgcaatacctgtaaatggccaaattaaattaggatcaactaatgcaccggagacaccttcactaatagcactggaaattgcactattaaataaaaacaatgcagtaactaaacctttagcattatctggtgctctagtatatgcaatttcataagctgttgtataacagaaacattcacctaatgcacataaaccgtaattaatgataacataccatgctgttaatggagaaggttcagaacaatcagttgcgtagtaaccacatggtgaagttttgtaaattctccattgtaaaatagcagagacggcagaagctaatgcaccaagcatgaaaccaacgaagatcttgtaaactggcttaaagttaattttccattttcttaataatggataaagaccataatctaagactggaattgcaacaacaataacaatttgattgaaattgttaaagaaatcatttggaatacctttggatgtcattgcaccggcttgtgcagttaatgttgaacctaaaccggtatcactcaaattaaagataacccagaatgagaacataacacattgagtaaagacggatttataatcatcaacttcttgagcagtccaatcaattggagtttgtttctttgtattttgatataattgacctctttcttccatattttcaggataagcatatgcccaaaattgtttattccaaattctcttgacaaaattacccttgagacaaacacgaacaactcttaaagctttacctaataatgaaccctttggtctttcaggttttaagtttggacgaatgaataacattgcaataacaacaataatatacataataccaggacaaaggaaagctaaccaataaccaacatctcttgcggaatatgaagttgcaatttgtaagaatgcaccaatattaatagcccaatagaaaatcatagttaaagtttccattgaaccatctctatcaacataaacggtttcaccatctggcaatttctttaaaacattttgtctgtatggatattgatcaagcatgaggggtaataaattagccttaatgaaaccagtacagacagccaatgagataatacctaatgcagttggtgccatagccgcttgaccttttgcaataacaggtggtaatgctgcaataatgaaaagaatatgtgaaataataccaacccaaacaccaatcataatagccttgaatctacccaatttagcatctgcaagataaccaccaattaatggcataacataagctaggaattgtaataacataactaaagcattagcatcttgtaaacctaaacctaaagcaccggcattaccggtatgaccctttaaaaccttaccagttgttgaaccatcaggtaatggtctcataataaaatttgttaaaataccttgaacaccataataggaacctctctctgcaaattcaacaactaaaattaacatagctgcaagtgttggttttgttctaataagtctataattaaatttatcctcagcagttgcaacagctaaccccattggattatattcatcggcatattctggaatatattcacgattatctaaaatttgataatctatatcatcaataagatgttttttaaaagaatctgaatctgaatctttactttcaatattattattattatttgataatttaattttttcaacattattaatatgttcattatctgaatctattataacattattagcttcatcaataaattgatgtttctctgtagaatttttctttgaggagaatctatccgttaatttggataacattttggatagtttagtgagatgaaattgaaataaatttttaaaaataaaaactaagagttaagaagaaaagaagtattattagaatacaaaatagaaaaaaagaaaggacattagagtgaattaaataagaaaattaaacgggaatccaacacaataaccaaaatgaccaaaatgaccaaattgaccacagtttatccagagttctaatccaataacagtaatgaatcatcggaataataaaaagaaacgatacgttctgtcaatataatgtgtcaatcaatgccttggaaaaattttaaaaatttaattctttttttcactggaaactccgatcatgccgttatttcaattaataacgttattatggggatgtacagcccatttcttactttatctcatctatatatggtagttgtagttccgttactgtttgtcgtgtaatgtgttattattattgtaattatagttataattatagttataattatagttatttgactattactatgagtacgccatcacagtagtaaaatttaagggtcttttcaaaattagggcattcatcgttcctcctctttttatatatagtagtaccttcctatagttaaatccccccagagagtaaaatgaagccatttacctaaatggcattagcataataaaccaaacaccatttcgaatccccagactctctattaccctatctttaccataatgaaaaccaagtgaaaaaaatgcgcaacttcacgtgcttttatagtaataaaactatttattattatagatattagataacaacggtccttaccatggtacggctccattaattattgatattattgccttactttacacaacgtcttatcttgtgccccaaattaatattacgctatgagtagatctctccacagtatgacccttaactaagcttaacacaatactagtataatctcatctcatctcatctccatcgcatcctattggtcacaggacccttaaggtcggtaaacccttaaaattttaattaccggatttttgtactggtatactgtaatattgtaattttgtaaaattcactaaatacatagtaaatacatagtaaatacactagttaccaatataataacatactatatcctataataactataatactacgctacagccagttccactgagtaaataataataataataataataataataatattccacttattaaaatttacgcggcaatgtagaaattatattatgatagcatgaatatcttaatcttaagttcttgtaatttatatttagttatcttgatttactatacattcataatttatattaatcttatcaaaccttattcttatctttttttcccttcaactttcccaactttgatccctttctactatttcaatccacacttatcttaattaatctctcccattcttaaaacttccatttctattatcatactgctccccccttttaatgttctctatctttcattatatttatttaaattctatttaaattctatttaaatcctcttaattccccccatatttccaatgccacatcttttattctctttatttcttccctccctcttcatctaacaacaaacattaaaacccttctactatgatgaactttttaaatagaagttcaagtaatgaaaaagattcaccaaatgaatatactacaaaatctgaaaaaaatgatattgatgaaacttatggatttgtatctgattctccatctcaattagctgatagagaatacattgctgaatatgctgatgaatataatccaatggggttagctgtcgcaactgctgaagataaatttaattatagaattattagaacaagaccaactttagcagctatgcttatcttagttgttgaatttgctgaaagaggttcttattatggtgttcaaggtatcttgactaacttcattatgagaccattacctgatggttccagaacaggtagagttatgccaggtcgtgaaggtaatgctggtgctttaggtttaggtttacaagatgctaatgctttggttatgttattacaatttttagcttatgttatgccattgattggtggttatcttgcagatgctaaattgggtagattcaaggctattatgattggtgtttgggttggtattatctcacatatttttttcattattgctgcattaccacctgttattgctaaaaggtcaagcggctatggctccaactgcattaggtattatctcattagcggtttgtactggtttcattaaggctaacttgttacccctcatgcttgatcaatacccttacagacaaaactgtcttgaaaaagatgccagatggtgaaaccgttttatgttgatagagatggttcaatggaatcattgactatgattttctattggtcaatcaatattggtgcattcttacaaattgcaacatcagtattccgcaagagatgttggttattggttagctttcctttgtcctggtattatgtatcttattgttgttattgcaatgttattcattcgtcctcatttaagacctgaaagaccaaaaggttcattattaggtaaagctttaagagttgtttttgtttgtcttaaaggtaattttgtcaagagaatttggaataaacaattttgggcatatgcatatcctgaaaatatggaagcaagaggtcaattataccaaaatacaaagaaacaaactccaattgattggactgctcaagaagttgatgattataagtcagtttttacacaatgtgttatgttctcattctgggttatctttaacttgagtgattcaggtttaggttcaacattaactgcacaagccggcgcaatgacatcaaagggtattccaaatgatttctttaacaatttcaatcaaattgctattgtcgttgctattccaatcttagattatattgtttatccattattaagaaaatggaaaattaacttcaaaccagtttataaaatctttgttggtttcatgcttggtgctacagcttccggtgtctctgcaattttacaatggagaatttacaaaacatcaccatgtggttactacgctactgattgtcctgaaccatcaccattgactgcttggttggcaattattaattacggtttatgtgcatgtgggtgaatgtttttgttatacaacagcttatgaaattgcatatactagagcaccagataatgctaaaggtttagttactgcattgtttttatttaatagtgcaatttccagtgctattagtgaaggtgtctccggtgcattagttgatcctaatttaatttggccatttacaggtattgcagcagctggtggtttctgtgcattcctctttttagttctttactggaacttagataaaacaatggcaaaggaagaagcagagagagaagctgctagacaacataaaattactgaacttgataaagttgaaattcaatcattagttagagttatcagtaaataaattcaatgtttaatattttaactatgcttttctataggtacatttttttaaatattttatattaactattattacattttcatacgcaattttacatcaattaatacacactgtggagtaacaattatgacattgtggaagaaccgttctgccactgtggtcaaactccacaaacgtcttaatacatcaatgtccttcctactgtacggctccaatagttttaacttaattacactatacaatctaactaattaccatttacatcgcttccgcttaccaattttatttaatccacaatcaccacaataatttgctaaggcaataacattgttatcgtatattatttcaaaaacccttaattttacgaatacaataagataagaagtcatctcattgataaggtagaaaaagaaccctttaaaattaatttgcgctatgtggttttatgctatgtttctattaccagtttatgctatgatacaatatattagttagttatacggcaacagtatagaattataaaacccttaaaatcaattaacaatccgataaggaaaaatcattaaagtttgcttgttgaagccctttaataaaggtagtaggaggtgtccctaaaatcaaattcctgcaatggtataagttgtgcaagtattatattttatggtatgaaattatgattttataaaattaattatcatattctgctttacaattataattgatttctgttgattccataattcacaattatggggaaactattcataaatctcttatactaaagataaaatatccaattgctttactatctccataaataccattttaatgaaattgtcagtcttcgtgtaatctatttaaactcacttatatcctcctatccatttaatgccatttaattcttaattcctctgaacactttctctcttttgacaaacactcgtttaatatttattatgatgaactttttaaatagaagttcaagtaatgaaaaagagtcaccaaatgaatttactacacagtcagaaaaagatgaaacaaataattcacatacttttggatttgtcacagatttagattcacaattactcaatagagaatacattgctgaatatgctgatgattataatccaatgggattagctattgctacacctgatgataaacttaattataaagttattagaacaaaaccgacacttgcagctatgcttatcttagtttgtgaatttgctgaaagaggttcctattatggtgttcaaggtatcttgactaactttatcatgagaccattacctgatggttccagaacaggtagggttatgccaggtcgtgaaggtaatgccggtgctttaggtttaggtttacaagatgctaatgctttagttatgttattacaattcttagcttatgttatgccattgattggtggttatcttgcagatgctaaacttagggtagattcaaggctattatgattggtgtttgggttggtattatttcacatattcttttcattattgcagcattaccacctgttattgcaaaaggtcaagcggctatggcatccaactgcattaggtattatctcattagctgtctgtactggtttcattaaggctaactttattacccctcatgcttgatcaatacccattacagacaaaatgttttgaaaaagatgccagatggtgaaaccgtttatgttgatagagatggttcaatggaatcattaactatgattttctattggtcaatcaatattggtgcattcttacaaattgcaacttcatatgctgcaagagatgttggctactggttagctttcctttgtccttgtatcatgtattatattgttgttatggcaatgttattcattcgtcctcatttaagacctgaaagaccaaagggttcgttattaggtaaagctttaagagtccttggtgtttgtttcaaaggtaatttcttcaaaagactctataataaggaattttggtcatatgcatatcctgaaaacatgaaagcaagaggtcaattatatcaagatgcaaggaaacaaactgaaattgattggacaatgcatgaagttgatgattataaatctgttttcacacaatgtgctatgtttgcattttggattatttttaatttaagtgatacaggtttaagttctgcattaacttcacaaactggttcaatgtcatccaaaggtattccaaatgatttttttaataattttaatcaaatcgttattgttgttgcaattccagtcttggattatattgtttatccgttattaagaaaatggaatataaactttaagccagtttataaaatttttgttggttttatgtgtggtgcagtagctactgcagtttcagctatcttacaatggagaatctatgaaacttcaccatgtggttactacgctactgattgtgatcaaccatctccattaactgcttggtatgcaattattaattacggtttatgtgcattaggtgaatgtttctgttatacaactgcttatgaaattgcatatactagagctccagataatgctaaaggtttagttactgcattatttttatttaatagtgcaatttcaagtgctattagtgaaggtgtttctggtgcaatgaaagatcctaatttaatttggccatttacaggtatttcagctgttggtggtttctgtgcattcctctttttagttctttactggaacttagataaaacaatggcaaaggaagaagcagagagagaagctgctagacaacataaaattactgaacttgataaagttgaaattcaatcattagttagagttatcagtaaataaattcaatgtttaatattttaactatgcttttctataggtacatttttttaaatattttatattaactattattacattttcatacgcaattttacatcaattaatacacactgtggagtaacaattatgacattgtggaagaaccgttctgccactgtggtcaaactccacaaacgtcttaatacatcaatgtccttcctactgtacggctccaatagttttaacttaattacactatacaatctaactaattaccatttacatcgcttccgcttaccaattttatttaatccacaatcaccacaataatttgctaaggcaataacattgttatcgtatattatttcaaaaacccttaattttacgaatacaataagataagaagtcatctcattgataaggtagaaaaagaaccctttaaaattaatttgcgctatgtggttttatgctatgtttctattaccagtttatgctatgatacaatatattagttagttatacggcaacagtatagaattataaaacccttaaaatcaattaacaatccgataaggaaaaatcattaaagtttgcttgttgaagccctttaataaaggtagtaggaggtgtccctaaaatcaaattcctgcaatggtataagttgtgcaagtattatattttatggtatgaaattatgattttataaaattaattatcatattctgctttacaattataattgatttctgttgattccataattcacaattatggggaaactatcataaatctcttatactaaagataaaatatccaattgctttactatctccataaataccattttaatgaaattgtcgtcttcgtgtaatctatttaaactcacttatatcctctatccatttaatgccatttaattcttaattccctgaacatttctctcttttgacaaacactcgtttaatatttattatgatgaactttttaaatagaagttcaagtaatgaaaaagagtcaccaaatgaatttactacacagtcagaaaaagatgaaacaaataattcacatacttttggatttgtcacagatttagattcacaattactcaatagagaatacattgctgaatatgctgatgattataatccaatgggattagctattgctacacctgatgataaacttaattataaagttattagaacaaaaccgacacttgcagctatgcttatcttagtttgtgaatttgctgaaagaggttcctattatggtgttcaaggtatcttgactaactttatcatgagaccattacctgatggttccagaacaggtagggttatgccaggtcgtgaaggtaatgccggtgctttaggtttaggtttacaagatgctaatgctttagttatgttattacaattcttagcttatgttatgccattgattggtggttatcttgcagatgctaaattgggtagattcaaggctattatgattggtgtttgggttggtattatttcacatattcttttcattattgcagcattaccacctgttattgcaaaaggtcaagcggctatggcaccaactgcattaggtattatctcattagcggtttgtactggtttcattaaggctaatttattacccctcatgcttgatcaatacccatacagacaaaatgttttgaaaaagatgccagatggtgaagttgtttacgttgatagagatggttcaatggaatcattaacattaattttttattgggctattaatattggtgcattcttacaaattgcaacttcatattctgcaagagatgttggctactggttagctttcctttgtccttgtatcatgtatcttattgttgttgttgcaatgttattcattcgtcctcatttaagacctgaaagaccaaagggttcattattaggtaaagctttaagagttgtttttgtttgtcttaaaggtaattttgtcaagagaatttggaataaacaattttgggcatatgcttatcctgaaaatatggaagcaagaggtcaattataccaaaatacaaagaaacaaactccaattgattggacaatgcatgaagttgatgattataaatctgttttcacacaatgtgctatgtttgcattttggattatttttaatttaagtgatacaggtttaagttctgcattaacttcacaaactggttcaatgtcatccaaaggtattccaaatgatttctttaataattttaatcaaattgttattgttgttgcaattccagttttagattatattgtttatccgttattaagaaaatggaatataaactttaagccagtttataaaatttttgttggttttatgtgtggtgcagtagctactgcagtttcagctaccttacagtggagaatttatgaaacttcaccatgtggttattatgcaacggattgtcctgaaccatcaccattaactgcttggtatgcaattatcaattacggtttatgtgctttgggtgaatgtttctgttatacaactgcttatgaaattgcatatactagagcaccagataatgctaaaggtttagtcactgcattatttttatttaatagtgcaatttcaagtgctattagtgaaggtgtttctggtgcaatgaaagatcctaatttaatttggccatttacaggtatttcagctgttggtggattctttgcatttgttttcttattttgttattggaatttggataaaaccatggctaaagaggatgctgaaagagaaacagctagacaaagtaaaattactgaaattgataaagcggaaattcaatcattagttagagttatcagtaaatgatatggtttgtattgattacagattatactactattactccattttattttcatttactagtattattaatctctctctttctttttatattgtacaataatcaataaaatttcaaacatttattatattaataagttatttaagataagacatatatattatataagcttataactaaattaaatactttcctttataccagttgctttaactaattcaatattttcaattgattgtaaattattacaaatattattaacatcagaagttgctattaaatattcgaattttgatgaaggtgctaataatttaaattcacttctccaatcagtattttctaatttagcatttggatttgattttaataattcttcatttgtttgtttaactttattttcccatttattaattttagcaatatcccttgataaatttctttggaaataatttaaattacctaaattatgatttaaatgattgattgaatcacttaattgatcatatgagtattttatattttcgaaagttttagaattaatagataattgattaatgttatcatcctcagaggtggtaatattgttaaattcttggattttcaaatttattaagttattagatttaataacaactggaacttcctctagtatatttttatatgataatttattttcaattaaattctttgcaatgaatttattctctgaagtgatagttttcaagaaagatttacttaatttataacattttaaatttaaataaccttcaattgattttaatggatcataaactattaaaattgaaggaatatcacttttattatttttaaaattttcttgtaattgatataatgattcaataattgattgagacataaatttaccaccacttgaagaaacgaaccaacctaataaatttgctgtattattagttgctcttaatttttctaaataattttcttgaaatttagaatttgcattctttaaattgaagaaatcttcaaatccattagaattactaaaattattaaaagttggaaatgctatagtatgtgtaatattaattatatttgattcaacaccataaaatccataaattggacctgttgtaattgcagttggattaatttcacctaaattagataatttcagtgcaacacttgcattcaatttgattgaataatcaacaactggtgtttcattctctaaagtggtattctcagccattattcctattcctttccgtgtacagtacctctacagaaaagcacccaataacaacaaccctataaggatgaaaaattggtgaaaaactggccaatttttggagaataaaaattttttcgcagtggacgagaaaacatgttggaaactgaaatttctctcattagtcatttattggatattataggtaattctttcttctttgatttatcttctaatagggtatcgaaatcatgagtgataaagttgaacaagtcactgaagctttagcaaagacttatttggatgaaccaactggtgaatatgtctctaagtctgaattaaagaagagacaaaaattaagagctttagaaattaagaaagcagaaaaggctaagaatgcagctgcaacagctccaaagatttctaaaactgttgatgaattagctaatgttaatcctgcacaatattttgaaattagaagtgcacaagttaataaattaagagaagaggaacatcattcacctaaaaatccttatccacataaatttgatgtttcaattgaatttgatgaatttatttctaaatatggtgatttaaagaaaggtgaaactttaaaggatgttaaagtttcaattgcaggtagaattatggttaagagagaagcaggtcaaaaattaaaattttataatttacaaggtaatggtattaatttacaagttatggcacaagctcaagatgctgatggtgattttgctgaaatgcataatttattaagaagaggtgatattattggtgttgaaggttatccaggtagaactaatccatctaaaggtggtgaaggtgaattatcagttttcgcaactaaagttaaattattaactccatgtttacatatgttaccaactgaacattatggttttaaagatcaagaagcaagatatagaaaaagatatttagatttaattatgaataagagaactaaagaaattttcattgcaagatctaaaattattcaatttattagaaaatttttagattcaagaaattttattgaagttgaaactccaattttaaatgttattgccggtggtgcaactgctaaaccttttgttactcatcataatgatttagatatggaaatgtttatgagaattgcacctgaattatatttaaaagaattagttgttggtggtttagaaagagtttatgaaattggtagacaatttagaaatgaaggtattgatatgactcataatcctgaatttacaacatgtgaattttatcaagcatatgcagatgtttatgatttaatggatatgtctgaattattatttagtgaaatggttaaagaaattactggtgattataaagttaaatatcaacctgaaggacctgaaggtaaaactttagaattagatttttcaagaccatggaaaagagttaatatgattgaagaattagagaaaatttttgatgttaaattcccatctgctgatactttccatactgatgaatttaataaatttttaaaagatattttaattaagaataaaattgattgtgcacctccattaactaatgcaagaatgttagataaattagttggagaaattgaagatgcatcaattaatccaacttttatatttggtcatccacaaattatgtcaccattagctaaatatgatagaaaaattcctggattatgtgaaagatttgaaattttcgttgcaacaaaggaaatttgtaatgcatatacagaattaaatgatccatttgatcaaagagctagatttgaggaacaagcaaatcaaaaggcacaaggtgatgatgaagctcaattagttgatgaaactttctgtaatgcattagaatatggtttaccaccaactgctggttggggttgtggtattgatagattagcaatgtttttaactaattctaatactatcagagaagttttattattcccaactttaaaacctgatgcagttgttaaaggtgatgaaattaagaattaatttatttatatatagtttattagtttattatacagatatacagatatttatttaacaatttttaattgacctttccttttcaattctaatgctttcttataaggtggagcagttggactttgaacaggatctaaacttaatgaatttatctgtatatttatattattatcatcatcttcatctaatgcataagttgcatctgaatcaattgaattaagatcaccacatgcaataaatggagcaacaattctttcttcatcattaaattctaaatttaattcattattaagagaatttctaccaattttcaaatcttggaaaaattcttcagttgataaatttgaatttaatgaaggtatccaaccatttcttggtctataaccaatacaaacaataaaagcttctaatgaactagctcttgaacttcttggctttgcacaaataactttatcgaaaaggtaacctaattgactatataataaatcaatatctctacctctaaaaattttagcaacaaatttaccaccagttttcaatatacatgttgctaattgtaaagcacttaaaattaattgagcttgaatatattcatctaaatcatgtaaacctgtaacatcgggtgcaccatcagaacaaacaaaatctgccttttcaccatcaaaatgatgcataatcatttctaatgttttaggatgtgttatatcagcctgtaattcaataacattatcaataggtgacattggttgtaaatcaactgcaactatctttgcatcactattatttttatctttaaatatctctttacttaatacttgagaccaagaacctggagctgcacataaatccactactcttttaacatcattgaaaagatcaaattgttcatttagttgaagtagtttaaaagcacttctagctctccaaccttcctccttggcctttctatagtataagtctctcttatccttactactcttacccatagtatcctatattctaccctgtatacctctcttaaaagaccgtaatagcagttatattaatataaagtattttaaaatccgtgcactcaataaaattaaatcaaattaaataatttttcaccacttttcatcaacttggacgatttgatatgcttgttataggggaagtaggtctgtttctttgaatatatctgctattatccatgtctctggctgctattagatcatctctgttgagagtatcgacttcatctcctctgaaaagatctttttcatcttccattgtctcttttaataagaatcttatcaatgaaaataataattcttcattagagaaagcattagaggaattatctgaattaaaattatcattaaaattatcatcaaatgaattaccttcaatagataatgaaactttagaaacttctaaacttatagatacattaacccaaaattataacccacaaacattaacagaggaaattataatgccaaatgctgataaaccattaccaattaatgcagaattaaattattatgcacctttaaaacatgatgttaaatttggtaatttaaaggcagaagttatatttaaatgttttgatcctgtaaatgttgaatttttcactgattttgcacttagagctgcttattatttaggtttaccagcaactggtgcaaaaccaattaaaacaaagagagagagatggacagttataagagcaccattcgttcatgcaaaatcaaaggaaaattttgaaagaaagacacatggtagaatgattaaaatttgggattcaaataatgaaattattgatctttggttatcttatttaaagaaaaattcagtttggggggttggtgttaaagttaatttatattcctatgaaaatttaacatttaatgaagaaatgaaaaatattgaaaatagtaaattggcattagataatttatctgatacaattgattcattaaataatgatattaataatcctgtttcacaaaaagttttagaattattaaaagatccagtatttacaaaacatatgtcaaaatctgatattgaaaagcttaatattgattttaaataaatttatatatatttatatacactgtacatatcacaatattatccatacatttcccaatcttcatcctcttcttcactatcaactaatacaggtaattcctttttaatagttacatcaattctacataatggacatgttttatttattttcaaccatggtacaatacattctaaatcaaatctatgtttagaattacatggtaattcaacaactaatggatataaatcatccttatattcatttgtacaaattggacatgtatcatcatttttcaattgttttacattaactctctctaatctatcaataaattcattacttacaccattatttgtatcacttttatctacaagaattgtattcatactattcatcatttgattaagtaaattgaaatcaacattatttataccgttgatactattatttattgaatttgataagttatttcttgaatcagttggtgtattaataaaattatttaatgcttgttgaacagttaatctatcaggtctttcaccctcagtattgttatttgtactgttcagtccgtgttcttcctcgtaagttggcatggttttgccacaaaaatggtgtagcaagatctgaagagcctttgaaaatattcatgtaaatacgtaatatcaacctgcactactacaaacacttctttcttttagtaaatgaatgaaaatacattcactgttataataagtacatttctaatactcttactatgtgtgttagtaagattaataatagttttacctgcatgtaatgttaaacaattcaataaagaatcatttactactaataataatattaaaaacactaaattaacgatattacttggatctggtggtcatacaggtgaaatgattagaattcttgaacaatggggcgataaattaaacaattttaatagacaatatgttattagttcaggtgattcaacatcaattcataaattacagaaacttgaagaaactataaataataaagattatcaaattgatataattcatagagctaataatattggatcaaataaattatcttcattaatcaatacattaattagctttaaatcaactttcaatcatattatttatcaaaaatggaggggattaccaaaagttttcctgactaatggaccaggtactgcaataccaattgcttatttattatttatttgtaaatttttgggggtttgtgatacaaagattatttatattgaaagtttagctagagttaatgatttaagtttaacggggtttctcatattaccaataagtgatagaattattgttcaatgggaaccattatctaaaaaatataaaagatgtgaatatcatggtatattgatatagtgtagtactatggctaattcttctttgcaattttagaatgtgtaactttctccttattattattaggagtatagtcttgtttagataatttaatcatttgtttattaactatattggaaactttcttcaattcatcttcattgaaatttatttcattattattacgacttgaccaacaaactcttattggattattttcaattgtaataagtaatggtgatttatactttttatccttagaagtaagcaatttatttgctgtagtttcagctaattgacgtgatttaaattcaataaatgcaaatttaccctttgctgaatataatgatattgaaacagttgatgatattaagttattaaaataatccaatatttgactctctgataatgaagacggtataccaaacaagaagaacgatcgtacattattatttgaaggaaaatgaccaagacttgaattgaatggtaataatttaacattttgtataaaagttttcttactagatgtatctttattattgggactattctctactaaagtagataattttgattctaataatttcattgaattatcattatcaattaaatgattaataccattattatcatttttaaatttagattccaactgtcttgaattatacaaacgacttgtaatatttttagcatttgatacaacatcattagttatatttaaattaagttcattaagatcatttaaattatcaattttagctaatttaagtaaattatcccttgttgcaatatcaataccaaaagttaaatctaacatacatgattgacaacaatttttactccttgaacatgttgaacagataactgttttccttaaattagcagtaccttttaaatttgatttattattattccatttgaaaacagtgaaaatttttgaacaaattttacattcactaccattattaagtctcttcatttcaatataaggattatcacctaaacagttatcacaaactgccggtgtttcattctgcgagtccataataatagagaggtttacaatggaaagaaaagaaaagaatacaaagaaggaatataaaagcaaagatgaaatgaagatcagggttaaaaagctctgtcaaagtttttttctttcatgaattttcaggtgaagaaattcgttgttaaaaaatgggtatcatcagttaatcattcatcttgctagtactacgataagaccatacacagtttaagaatacagtgtcctcactgtactttctacaactggttgttctcagtaaatgaagaagaagcaatgaagacattaacaaaaaaagaggaaaagcttgtccttttatagtgcgaaacccgcatttgaaatgactctttttccaattagggttgctgagcatttgattcaattatatatggggtatatttatatgttctttattggttatcataaattaatggcacgaccatcgtcaagtaagtctaaaactatcaagcctccagggtcaagtactgttagagtgtctgttgcctgtgatcgttgtagaaagaaaaaaattagatgtttttatgatgatagtaataataatcaaattcaacaaggtcaatgtgctaattgtaaagctgttggtttggaatgtatctttactgataaattagcaaggaaagctttccctagagggtatacggaatcattggaggaaagagttagggaacttgaatatgagaataaaaaattacagaaattgataacgttaaattctaatgataataataaagatggtattaatggttcaattccaatggaaattacaatgtctgataatagtataaataatgatataaataataataataataataataatatatccaataataacatcaatacgttttccaaaatacgaaataatctctcagataatgataatagtaatgatacaacaaatttaaatcaaaatcaacttaattctctaaatgataataatcaatcatctgatcatttatcacattcacatttgaataatcctaatttaagagatacgagtaatttccaattacatacagctaatgtttcaagattagatattcaagaaaaatctttagatttacatcaacatgatgaaaattgtaattgtggtatggatcattcagttattaatagacccgtttcaattgctggctcagttgatatagatagaggtgatttaactgatgatgatgaaattgataatataattaataatagatcaagacaaaattctatatttcatttaaattctccttataattcaccatttagtgatagtcatgatactaataataatatgaatatgaatctgaatataaataatcaaattaatccattccctaagaataatgaatcaaacaataataatgaaaataccacaataaagaatagatttgtttataatcctaattcatttgaacaaattaatgcaccaggtgcagcagctgcagtttcattacaaaataaattaagaacaaaaaatttccttaatttagccaatcttattgcagcttcaataccaagatcaacagaggaaactttatttataccaacattattagctagaattattaaaactcatggatttgattctaaagcaccatatttaacagctagatcaattgcattattaaaacaagcacataatgaaaatgagagatataatttattaccaattttatttcaaggaattgattttaataatttaaaaaaggaagaatcaaaaaatttctttaatacattaaatttaccaaataatatgaatttagatatttgtattacaatttattttaatacttggaatacaattataccaattttaaataaagatatctttatgacaaattataaaaaatttactaaaagtagagaaaataattttgatgatggtgaaatgattggatttgaaaaatttggtgaattattagttattataacatgtttagttatgatttcaacagagagggctaatgttgcatttaaaatttctaaaaataaagaaaataataataataataataataataataatgaaaatgataatgatattaataatgattcaattaaatcaggtaattatgaaatattacatttttatgatcatataattaaacaattaattaaatctaatatgtcatcaattggatcaatttcttcattacaaataattacaattgaattattatattgtttagcaacagaagatttaacaacaagttattcattaaggggtaaaatgattacaatgtcacaacaattaagattacatagatgtccagcagcagttttaggatcaaatggttcaagtgtttctaaattacaacaaggtgagagaagaattttattttggtgtatttatacattagatagttttagtgcatttatattaggtgttccaagattatttaaagattatgaaattgaatgtgcattaccagcatcatcaaatacaacaacaaattcatcatcaaatgaaattaatttaattacatttaaggataatattcaattatcattatttggtaaagttagtgattcagcattaagtataatgagatattctaaaattttaggtacaatagttgattcaatttttaaaagaaatgaaggtgataaacaaacaattatgaatgaaaataaatgtttaattatggaaaatttattagattcttggagaatgaatttacctaaatcaatttcaattgataaagtttataattcaaaagatttaaatttacttgataatttaaatgaaattcaattaacattatattatttatattatcaagctaaagcattaatttatatgccattattagctaatgaaagtggtaataatagtaataataataataataataataataatactgataacacgggaaataaattttcacctgcatttataagtattcaaaaggcaagtacatcaatattaacaacaatgaagatattaaatagttcaaaacataattattattttttaccattaccaattaatttatcgagacaaattgcaagattttccctattagcagcaaaaaattcattagaatatactagaggtggatcaatatttcaagaagttaaaaatttattaaatggtataatttatgaattacaaattcagaataaaattggattattaggttgtttatcagattcatgtatttcatgtttagagaatgcaattgaagcaattttatcacaacctaaatctaataataattctgtaagtcctaatggtagtaataatggtacaacacctgttgctcctatagttaaaaaaattgataataaagttaaaattaataatgaaattcataatgaaattattgaaaatttaaaatttgagaataagaaagttaatggaggatcaccattgaagaatgtatcaaattttgataatatgggaagtaatgggaatttgaatatgaaatctaaagtgaaaagagagagagatgatgataataaaggtattaagaaggaaattgcaattaatgatatattttctaataataagaataagaataagaataatagtagtaatggggttgttgataaatgggttagtaatgataatgataaaagtattaaaagggaagaatttaatgataataatatagatactgatatatttaaatttatgtctgaagatccaaaggaaatggaagaggaaagtttgaataatatattaaaaaatgataatgataatgataatattgaaagacagaaactgcttattgaaaagaaacaacaatttttacaaactcaacaagataatttagagagacaaattgaattattaaagggacaatcaaaagttagtgatagtaattcattaagtggatttaatttaaatgcaatgttaaatattaatgatattaatattaatgatattaatactaatgatatgaatatttatgataataaatcatttacagatttactgatgatgaatgatttcggagttgatgcatcattaggtatgccattaattgattttgaatttgataataataatgctaatgctaataactctactaaaagacaaaagaccgtatctaataatggagattatgaatatgataccaatagggttgataaagtggaaagatcaagaagtgaatcaccatcactgttcagttggaatgtgtagtccgtgtagtccgtgtataaagaatattaatatagaataagacaataatatagtaataatcatgcgattacctaatcttcccacccggagaaaaggtgacaccacttggcgctgaggggggtgaaggtggcccggagagagtatgaccattttatatttgtctttgataatggatataaaaggagacatgttttcccagttttacaattggatttgccactggtaatttattttgaactctttacttaattcttatattctttcatcacaattgtttactacaaacaagtaacacaaacaaaacaaaacaaacaaacaaacaaacaaattaacaaaacacaatggctattacagttggtattaacggtttcggtagaatcggtagattagttttaagaattgcattatcaagaccagatattaaggttgttgcaattaatgatccattcattacctcagattatgcatcttatatgtttaaatatgattcaacccacggtaaatataagggtgaagttactcataaggaaaatggtatcgttattgatggtgctgatattactgtttataatgaaagagatccagaaaatatcccatggggtaaaattggtgttgattatgttattgattcaactggtatctttaaggatgttgaacctgcaactaaacatttaaatgcaggtgcaaagaaggttattattactgctccatccaaagatgcaccaatgtttgttgttggtgttaatcataatgaatatactaaagatttaaatattgtctctaatgcatcatgtactactaattgtttagcaccattagcaaaggcaattaatgataaatttggtattgaatctggtttaatgactactattcattcaattactgcaactcaaaagactgttgatggtccttcacataaagattggagaggtggtagaactgcaagtggtaatattattccatcttcaacaggtgctgcaaaggctgttggtaaagttttaccagttttagcaggtaaattaactggtatgtcaatgagagttccaactgttgatgtttcagttgttgatttaactgttaatttaaagaaagaaactacatatgaagaaatttgtgctgcaatgaaggaagcttcagaaggtgaattaaagggtattttaggttatactgaagatcaagttgtttcaactgattttatctctgattcaagatcatcaattttcgatgcaaaggcaggtatccttttaactccaaaatttgttaaattaatttcatggtatgataatgaatatggttattcaactagagttgttgatttattagaacatgttgctaaagtttcatcagcttaaattaatgatatgatatgatttctatttctaatttatttatttaacctacttatttaatttaatttaataatataacactacttaaacttacgtaataataataataataataataataatccacattaataataaacaatacaataataataataataataataataatagcaatcaatgctcatggaagttttttaataatagaaaaagggcaatttattatgttttgatattttgacattttgatgttttgatgttttcatatttgccatcctttccttcacttctttctttcctttggcaatcaatctacaccctgtttatttattatatacactctttgctatattaaacctgcctgtatatacttaatataccctctcgttgtgttttaaataacattatttattaattatttcatttatttcattttacatcattttatttcattttacatcatttctttgctattctttgctattatgtcaactgtcaatcacaatccccattcaaattcaaattcaacctctcctaaatcttcatctcctaaaagtacctccttcaaaatcattggttgaaccattaggatttatcatcaattaaaaatactaatacaaataataataataataataatacaaaatcaaataatcctcaaagatttttaccaaaacaattagttattggttcaccattttatcaagattcaaattcttcattctcaaatgatttacaaactccacttttaaataaatttaaaacttctttaaatgattgtattaatgaagatgatgaaaatgatattaataataataataataataatagtgaactaaaagatcataatgaatcatctaatatatcaataattacaagaagtttgaaatttttaaatttaccattggaaatttcattatctgatatactaaatttaattaattttggtccaattgaatcttgtgattttgatttaaatgatgaatcttcttcattatcaaattcatcatctcattcatctcctacaaaaggtttggaaatttcaaatccttatcgttcaattattgtatcatttattgattcatttcactgctaataaatgttataatcaattaatttcaattattgatgatttaaaaattaatttaaattctgaaaatttaaatataattaaaattaaatcaccatcttttatcaaattatttgaaaaatgaaattaataataatggtgcatcaagagctttatgtttatcaaatttaaataatcaattatcagaagaaataattttcaatgaattatcatattttggtgaaattacaaatattaattataatattaataaaaattcttgctttgttcattttaattcaattttaaatgcaattaaatgttttaatcaattacctttatgtaattcaattttatcaaattcaataatattttattcaaatgatagaaaatttaattcaaattcaaattcaaattcaaataatttgaaaaaaattaatttatcttcatcaatttcattcttagatacttttaatgatttaaatgatttaaattctttaaagagaaataatattgttaatgaaaattattcaatttcttcaacttcaatatcttcaagaagagaatcaactgataataaacaaaaaaatacaattacatcaaaattaattaatagtaatagaagtatagaaaatataagtaatgaaactgacgttgaaatagatgttggtagtagatccaatagtaagaataccaataataataataataataataataataataataataataccaatcaagatcataatatcaataaaaaaagtcaacaatattataataaatttaacaaaccaactttccataaatctttcacattttcaccttatcaaacgcattatgatacttcattttcttcaaattcaataactccaattccaattacaccttatagtcataataatatttataatttaaaatctttctcattttcagatataccatcagagagaaatatttcaattttaaatcaaaataatattaataatagaactatttatttaggtaatttagcttttaatacaacagctgaaaatatttgtaatacaattagaggtggtatgttagaaaatattaaagtgttaacaaataaaaatgcagcttttataacatttttatatcatgaagatgcagctcaatttattgcaaaatattcaattgaaaaaataataattaatcataaatatcttaatattggttggggtaaaaattctggtaatttacaccctgttattaaagaagctgttgatcaaggtgcttcaagaaatttatatattggaattaatgaagatttagaaactgaaaatgattacgattttataattgatgaaaaattgaaaaataaattacaaaataataatgaagattttgaaaatgaagatatttacaaaaaagtttataaatgtattccaaatgagaatgaattacgtcgtgatttttcaattttcggtgaaattgaacaaattaattattttaaaaatggtgcatgtgttttcattaattttacaaatattttatcatgtattaaagctattaatgattttaattttaatggtgaagaatcaatttatttacatgaatcatttaataataaatataaaaattttataatctcttatggtaaggatagatgtgcaaatcctccaaagaaaaaatcatcaaagaaaaataagaaaaaattaattccaaaaaataatgataatagaaataatagtttttcatatatgtcaattggaagtaattattcagttgatactgattttgcaattaaatttgattcagcatttgaaggtatgggtattagttcaccatctgctaaaaagaaatcatcacaaataaagaataaacaatttgatattgatgattctgatgttgatgatgatgaagttgaaattgaaattagtgttggaccagaagatacaacaaataatgatagaaatgatacacttgaagaaaaagatgaagattcaattaatagaagatatagtaataattctatttctagatcaacatcaacttcatcatttcaaccaatgtcaacaccaactccaaatattggaccatcaagtataaattatgagacatactattcacaaggtaataattatatgataacaccacaaccaccatattattattcaaataccccaacatttccaccacagactccaactaatgaatatggagtgttcccaaataatcaatttgtttatcaatatgttcaaccaatgtattatggtgacaatggaaataataataataataatggtaaaaactttaagggtaaaagaaacaagggtagaagatcatttaatcatgatattaataacagtttcaatcaaagttttacatagacaatttttttataaaatatatgatataaaatatggataattaatatttacagtaattaagataatagataactattaacagaatttaaagttgctctttgtgggttaagtttccttatatctaataatttaataaaatcacgtcttattgaatcttttgataaatttaatttattattattaatatttaaacaacaaattatgacaccaattgataaatcttcaccattattacaaagtattagtgttttatccattgatgttttaacaatatttattatttcaggtaacttaaatctaagtaatttagatgattttttacaatttgaatctaatttaaaaatatgaattatatcttgttttttattttcatttattaaaagattaaatgatgaatcaagtataattattttagaaaattctgaataatttgtttcatcatatttgaattctatatttttaataattttaccaaaatataataattcattaactctataaatatcatcattattccaaaattgtaataaattattattactaattatcgaagattttttattaatttcattatttactatttcattaattaatttttcaacatcattatcatttaaattaattaaattattaaatttctcaatattttgataataaagttttggtgataatccatttgaccataattcatgatcatcaccagctccttgaacatatgtaaatccatttattttattttcaccatcttgaaatttttcacttgcagaaatcattataattggatggaaaggttcattacctgtgaaaattgggatttccttacaactgggataaatccaaaatggttttaataattttaattcttgttcattaacttttgatttaattaaatctaaaaattcttcaatatttgaataaaattctggtaatttatccaatattctatcattttcatatttagaaactgtttcctttggtgttttaaaagtatctttaaattcactattattaataattttatttataatggaaatccaaattggtattgttttacttaatgaatcaggtattttcttaccccttctagttgaatcaattattaaaattccattattttcaataataatctttaataaatgtaaatttaatctctttgttgaaaatgaccaattatttgtatgaccatcagttgatttaaaatatgaagttgttgggaattcaggtacataccaattaccacatctttcatttggtatttttggataatttgaataataattttcatgaattttattaataaatttagtatctttttcaattgataataatctatttcttattgaaatattttcaaaatgtaataatttatttaattctgttaaatcattaattaattcaggatccatttgtttagtaaaaagaggtaatgtgtatatagaatccagcgaaaattttatatacttctattcatgttagttatcattcatttcttttgataattaatgacggttaaatattttaagggagatttattcaaattaactaatgaaaaaacttcaagtccattattattagctcattcatgtaattgtattggtatttggggtggtggaattgctaaacaatttaaaattaattattttaatagttataaattatataataaatattgtcaaattgtatcgaatccaaatgatttattaggtaaatcacttttattatcaactgatgagaatgttataattgtctgtttatttacaagtattattggagaggaaaatgaattagaaattgtacataatactaaattatcattaattgatttatataataaattaaaagatcctaaattaattgaagataagaaagttaggaatattataattaattataattttattataattaattataataatgaaataaatatggatatttctaaatatattgttaatatgccattaattaattcaggtatttttagagtttcatggggattaactgaaaaagaattaattgaatctgaattaaattgtcatgtttataaattgtaataagtagaggacttgtttattgtattttataatattttataaattaaatacccaactgtgttttaatatcatttctagacatgtgttgaaatagctatattttactttttagctacatgtacttttcgtatagttatcatttttaacgcataaatacttcttttaaagtacaataaaagcatacatcatatactccaatactttctctatctaccactactacctacaacaccacaatccctataaaaccactcccaaaccaccaataaacccatccacacaacacagaaacatgtaataagacagcgataagaaaattaaaattgacgagccccatttgaaaaatattactttactttactttactttactttactttactttaaataactatccataaaactattacttagcagtataagaaaatccattaaaacaatcattatcatttaaattattatcaacatttaaatcaccatttaaatcacttattttcatattagtaaattctatatcaaaattttctgcattttcaagattattaataattggtttaataggtggttccacaactctattttcaatatctttaaatttataatgtctgaaaaatgagaatttttgataacttatccaattatcatcaacattaaatcttttagcagttttttatttaataatttatttaataattctttactacttgtcattaaatgaaatggatatttaggtttttcctttaatactttattaattattttttgatgattattaccagtaaatggtggattaccagttaataaatcaaataaaacacaacctaatgaccaccaatctgctaatgaaccataattttcaccttttaaaacttcaggtgctgcatattcaggtgtaccaataattgaattacaccaattattattatcttgatcatcagttgattttttagctaaaccaaaatcagttaaaattaaataaccatctttatctaacatacaattttcaggttttaaatctctataaacaattccaaatttatgtaaaaaatttaatgccattgacatttgaattatgtaaaaacatgaacttttttcattaagaaaattctccttgattaaatatttgaaataattcaccacctggtataaattccattaataaatataattttgaattatcatgtaatgcataaaataatttaacaatattttgatgtgatgttatctttgataaaattgttctctcacttaaagttctttcaatatttttattattaattataattgatgctttctttaattccttttgtgcaaataatttaccattatatttatttttaactaatataactttaccatatgcaccttgacctaaaacttttaatttttcaaaatcatttattttacaatttggtgtattagaatttgatcttttatataattcatcgttagtatcagtaaatatatcaagtttagtttttaaagtttgattatcatcaatttgataccctactgacattctccttaagtacactagatcttctcttagtatgaggtagtactatatctccctcatcatcatcattatcactattattaaggttaatttctgaaatttgtcttgataatgttgaaatgggggttatatttaaaatttccctcttttcaaacaaaatactatttatattaccttcatcattatcattcattaatttattatagagtactgtataaaatataaatataagagaagtcaattaatatagatatattgataagaattttattatgtgaaaaattaaagcgattattattattattacttaagagaaaaactttgcataattatttctttcagtttctttattctttgaaattatcttattcacaatttcaaattcattcttaatggaaatatcattaggaacaataattaaacctttatttaaagtttcatatgcaatatcgaattttttcaataatctataagatttacctaatctatagaaaattttagccatttgaatatttgttaatttaactatctttattatcatttaattgtaataaaattccacaataattaatacataattcataattatttaaatttaatgaaactaatgataaatttaaataaattgttaattttaaattttgaaaattaataaacatttccttatttgaattttcatcaggtattaattcattacaatatcttaaagctttcttatattttaaaagtgaatcctctaatcttttatttttaaataataatgtagcagattctttaattttaaagttatttcaaatgattgttgaatattttcaaaatttatatttaatttatcaaaatcattatcatcaggatattcttcataaatatcaccaccaatattatcaatacaagcaaatttatttggtaatgacattaaattattccatttaccacaatcagttattataattggtattgaaggtatccaagataatttatcatttaatttatttgaaataacattagatttttcaatttcccttaaaattgatttaccataaattactttaccaataactgtatgtttaccattaagatgaggacattgatttaaagttatgaaaaattgtgaattattatgattttttttattaaaattagttaaacaaagtaagaatgatttatctaaattaataaggttttcatcatccaaaaattcatctgtatcattatcattatctattgctaaattatcaatattaggataatttgatgcaatattgtcattatttgaattaatattaatattaccaccttgaattataaaatttttaataattttatggaaataagtatttacataagatttattttcacataaattaatgaaaattattggaatttaaaggtgcatccttagtgaatagttcaaatactactctaccacattgtaaatcccctatagatagatcaaaatagacgtaatccatcctatacccaatgaaaagaaggtatgctatagtaataattacataatcagtgcaccatagtaaattttcataataattgaaatttccatttattaaaagtattgtatagtgaagtatagtatagtataggtacttctttagagcaagacaacatgcaaaggataagtcgtttaggattagataagaaattttagtacatcttcaattatcaggaatgcaactacatttggtgaagttgctaataataatagtactaaatcaaataataaaaagaattcaattaaacaagtaaaggatattgttactattaagaatattttacattgtaattttaagaaaaacaatacatttttaacattaactagagttgaaatggataaaaatttccaagaaactcattcaaaattatcatttaatgaacaagttttatattatttaacattaccacaaaaaatttcaatttctcaatcaacaggatatttaggatttaggaaagcacagaggggtgaatatgaggcaagtttccaattaagttcaaatatttttaaaataattaatgaaaagaaattaattaaaaatgataaattagaaattgtcattagaggtttcggtaagggtagatcagcattctttgatgcattaaagggtaaagaaggtaatgaaattaggaaatttattactaaattaagtgatttaacaccaatatcatttggtggtaatagagctccttcaagaagaagaatttagtatagtatagtatataatctgtatataaagtataagttagtaaaccctcaatatcacgtgcagccacagagggttctacaacacaaaaagatgtcataacccacacaaataaaattattatactctctctcttataatattaaatttacaaattttttcaaaattcgctatattaagaatatcaatcctctatttttcactatcttatcttaatatcttactaacacttcttttcaattatcaatcaacaatggcttcttcaactgctaaagcacaatctgcaaagaaatctgctcttaaaggtgcaaattcttcaaaagctgttaaagttagaacttcaactacttttagattacctaaaactcttaaattagctagatctccaaaatacatcaaggcagttcctcattataatagattagattcatacaaggtcattcaaactccaattacttctgaaactgcaactaaaaaagttgaagatggtaatactttagttttccaagttgatttaaaggcaaataaatatcaaattaaacaagctgttaaagaattatatgaagttgaagttgaaaaagttaatactttaattagaccaaatggtactaaaaaggcttatgttagattaactgctgattatgatgctttagatattgctaataaaattggttacctttaattgtgatgatgtataatcttatatatttttattttataatcattgtatgtattacttttaataattatctaacataatataccctctatgtcttaatactctacttatcatatcatacagataatattaaaataccatattaaaaaccctattactaaaaagacctttaattaagccctctttaaaatttttttctcttttttctatctcactttttcaagtataaaaggaagtaagttcccaattttcttaaggtatattcttttgagatttcttctttctttgtcgacgtacttcataggatcatttctataggaatcgtcactttttgactcttctaaagagccactgaccccaacttggttgatgagatagaacccccataccctcaaagtgagaataaatgtaataattggaagaatttctttctttctttttattataatagtaaattatcattacagttttgtctacgattcttagtaatctagtcatctggataatttacgaaccctacaaatttcattttttattccttttttcatcaggtaaataaaggagcaatgatctttgtcttaattaatgtacttcttcggaagtgattttttaagatgggaatgggtggctgtctgacaagtaatataatataatctaaaaagttggagtgtgttgaccattgtagttgtaaatgtagtgtagtttcttttacttaacgtatggtaccttgctaagccgcataacctgcctgtcccttagaatgaattcttataaaatctacgataagatccatctctcggagttgacttacatttagtttcttcctctatctacatggcatttattatcgatcaagcattaaaaatcgtttttcttaaaatatttggtacaacaagaccaaaatttttaaaatttacaacaagtgatgaagaaggttattatgatccatattttgaaacttcaattgattcaaagggtaataaaatattaaaaaatagacaaataccaattaatttcccaaatgaattagaaaatgatgtaatttatattaaaaaaacttgttatttaatggatgaaagtttatttggtttaaaaatgtcaaattttgttaataaactatttggtagtaaaaaggctaaaaaggtaaaggaagatagtaacattgatattgatatacctacaactcctaggaaattaggatttggatttggtccattaatacaaattttcccatttttcggtaattatatagtacttgcaattaattgttggttattaatttgtatgattgaaattggaattggttataaaattaaattcgaagataaaagattaaaattaaaacattatcaaacaaagaaatttcttcatcttaaatcaattggtaaaatgattttcaatataatgattgattttggtattggttttataccattagttggaggttttatttcaattattcatcgtagtagtagtagaaatttagctattttttggaaatcaatggaagatagttattcaattagtaattaaaaccagggtattttatattatatttatatctatttattttcttatatactagctatttatctatcatttataaacaaaatttaaacctttttcaacattttgattaataaaaccaacagcaattataaataattctttttccttttcattcattttatcaatccatttataatcaacatttttaataccattaatatcaaaattcattggaattgctaaatattttggaatttctaatttagtaccctttaaaatttccattaatccagttttcaattctttcataccattaattgaatcatctaaataaatataacttgaaatttgacaattattattattattatcactatcactatcattatttaaataaccattaagtattatattgaaaaatttatttgatgcataagccattgataaagtacttgaaccattaccatttttagcttcaacaatttcatcaccaccatattgaactctatgaattaatgcatcataaatattatcatcatttagaattttataagatttatctaattgactaaataatggtacaattgaatgacctgaatgaccaccaacaacaggtacattaaaatcttttggtaaactattatcaattaaatttgaaataaaagtatttgaacgaacattatctaaagcagttacaccaaataattttaatggattgaaaacaccataattatttaaaatttctctaaaaattggtattgttgaattaacaggatttgaaataactaaaataaatgaatttggtgaatgaattgcaataaaatttgctaattcattacaaattgatgcattaatattaaataaatcacctcttgtcataccaggttttcttggtatacctgcaggtataattataaaatctgaaccttttaaagcattaattaattgtgaatttgtaccctttggttcattattatcacgaatgaatgaattaattttaacatttgtatcaatatgatttaaatcagctgcaattccaggtatattaacaacatcatataatgataattctgtaatataaggatttaatttaagtaataaagataatggttgaccaataccacctgctgcacctaatactgttactttaattgatgatgacattttaattttttaaaaggaagaaagagtataggaataatagtagtatagaagaataaaacgggataaagagggtattttataaagaaatgattccaaagaagggttacagggctttgatatgtagtcattagaggtataataataataataataaatggctgtaataggacatgttgcatgacttgaaatattatcaacttatgtaataattatgatatgttgaatcccatcaaaaacgaacataagtagtaaatgcaaatgaaagtctctgtagggattacatctatataggagaatcgtttaccgccaattgtcatttgtaatataatattaatgaaatatactttaaacaatacaatataataccatataatacaatataatataaaataaaataaaataccatactttagttaataatacactagtaatattactaacctaatataatataataaattacatataacatactatactatactatactatactatttaatataataatatcaatataaacaaatactataataagtaatttcaattatataagacagtggaggtgatatttccccatagttaaagagaaggtatttaataatataagacacggaggatatgtctctctttttatagtgaaaaggatttcttctttttgaaaaaattttttttcactttttttttaatttcgcgcccttcgcgggtttttttattttcaacgctcggctcagctcttatgagggtttgtcatcatttttattcattcattcattacattgatttataatcatcaatatataccattcagacacttcttttaaaataacaaatgtttacaggtattgtagagactataggtactgtattagaatacactacacttgacacatctgaatctggtgggaatggtgtatccttactcattggggatgctgagtcaatactaaatgattgtcatttaggtgattcaattgcaattaatggtacttgtttaacagttactttcttcaatgcttcatcttttaaagttggtatatcacaggaaactcttaaaaagacaaatttaggttccctcattactggttcaaaagttaatttagagagagcggtatctggtaatgttagatttggtggtcatatggtacagggtcatattgatacaattgctcaaataattaattctaaaaatgatagtaattcaattatttatacttttaaattaagagatgaagaatttattaattatattgtttataaaggttttatttgtattgatggtacaagtttaactgttattaatgttgattataaaaataaaactttccaaattatgatggttgcttatactcaatcaaaagttataatgacattgaaaaaaattaatgattatgttaatattgaagttgatttaacaggtaaattaattgctcaacatgttgatttattattaactaatcaattatcaaatgataatttggattctcctctaaaattatatattaataatttaattgatcaaaaattatcaaatttatctaattaatgttatatataactatttatttactatttatatttggaaaactaatgaaactccatcatcaccagctgaaataactctttcacctgaacaatcaatactaaaatctaaaactcccatatgatgtccaacatattcatgtaataattcacctgttctaacatcccatttataaattttaccatccattgatgaaactaagaaatttggactattctttaaaaattcaattttagtaattgcatcttgacatttaagcatttttctaactttccatgtattactatcaaatattaaaacatcacctgaaacaaatccaacaaccattaaatttaaaatatcacaaaatgaaattgcttcaattgatgaatcataaatatcaccatcttcttgaacttctaatgctgtaaataaatttaataatgatccattatcaatattaattatagcaatttgactatctcttgatccaattgaaataattttattcttattattaataccaattgaaacccatggtggtgttaaaccttttaaattattattatcaaatttaaattcaacttgttgtgtataacaattccatcctattatactaccatcttcactaatactaactaattttaattcatccatattatcaatttgaataaatttaccatttgtacattcagttgaatgtgaataacctgaaaaaattaattctaatgttggttcaattgaataaactgaaactgatccatcaatacctccaaatgcgaaaacattttgctttggatgtgtatgaacccatgtaatttcttcaacatcttctaaaattctatcatattgttcccacatttgtcccttcttcattgatttgaaaacaattattttaccactcatatcacctgtaactaaatatgatccatcaaatgtaaattctgctccaattacactctctccaaatccaactaatttattaattgttttggcaggtgaattatgtgttgtccataaatatccaacattatcaccaccacctgtaactgcaattggtaaatttggatgtgttgaaactgtgaaaattgaatcttgatgatcttcaaaataactttgagaattattactcatatcaatctctaaattaccttcatcattaattttaactccactaccttcaaatccttctgccatatctgccatatcttcctctgttaattgataattttcatcttcaattggttcatcttgatcaagttgatcttcatcaacaacttcctcaacttcatcgttattaataatgacatctccttcaatttcttcaatattttcttctcctctaaattcagacatagtttgtatacctaaaaaagaagatgaagaaaaagattagtaatgattataatggattaatgaaaaataaagtgaaattttttaaattttttttttcttaatcaatctttttacgtaatgtttatcatggagaatctctttgtatatagcttataatagcaatgaaaatataaccatgactgatgcatatgatcaagtgaagaaagacatgggagtattcttcccagataacacagttaaagaaactattgatccataccaagctaatatccaatttgaaagaaaatcaataaaatattcaaatccatcaaataatctaccaccaattcaattcaataatagtaataaaatatcaatattagatacactacgaataaatggttttgatgccgatgatttaggattacctcaaataaaaaccaattcagaattaaccctatataatgaaaatactgttaatgacaaaactataataaatgaagatacatttactaataaatcaattataccacagaggaaaacacaggtaccatcaattaatactgaacaatggaaattatctaaattattattaggacatacaggtcaaataacttctactgcaattgatccatttaattcatattttgtaacaggttcaagtgatagtacaattaaagtttgggatttaattacaggtgaattacaattaactttatcagctcatataatggcagttaagggattagttatatcagatagacatccatatatgttttcatgttctgatgataaaactgttaaatgttgggatttagagaaaaattcagttatacgtgattatcatggacatttatcatcagtttattcaattgatttacatcctgaattagatttaataataactggtggtagagattcatctgttagagtttgggatattagaactagaaatgcaatttatacattatcaggtcatgctagtagtattaataaagtcaaatgtagaaatattgatcctcaaataattagttgttcacaagattcaactgttaaaacttgggatttagcagctggtaaatgtttgaaaactttaactttccattctaaaagtgttagatcatttacaaataatgaaaattttggtaataagggagaaattataactgcttcaagtgatggtataaagaaattttcattacctgattgtcaatatttacaggacatgaatttttgggaaaatcatgatgttgttaatgaaggtaatttaatgattaatacaattagttcatctgatgatggaatggttttcgcaggttgtgataatggtaaatacgctttttggaattgggaaaatggtcaaatgattcaaaatggtttacaaactccagtacctggttcattatctagtgaaagtggtattttatgttcaacatttgatagaagtggtgaaagattaattacaggtggaattgataaaagtgttcgtatttggaataaaacataatagtcattttttttaaaaaaattttataaaatataaccttgatctgaataattaaataccaaactaaaaaatacaaaaaaataataaacaaaacacacccattataatgcttccatggtataatcgtgttcaatacctggagtaacacttgatataaattttaagaaaacaattaaatattgatcaactcgtataccttcaattttttcatcctttaattcttcccaatcatcttccacattattattattaccatcatcatcattattattgataccaagtttagatattttattaattaatttagaatcactttcttgtttcctctcttgagctgcaattattgaccttttcattaaaactttcataacagttgcatgtttacaaggatgaattgaaactgctgttgtatttgataaaaatggtaatttttcaattgtaacagttttatgacgataatcacttgcaatatcttcaaacatttcagttggtgttaatggtatagaatctgaattaaatccaaccatatacatcttaggcacacgatatgaagttgaatatgaaatatataaatcataataacgtttcgatgattgattggttaatgagttagttttagataatttgttattattatcattacccttggagaaatgagtatcaacaaattcaacatcttcagcattttcatcaattaagtcatcaatatcattaatatcatcctcttcatcatcagaaatctccttaatacttgcctcatcaacattatatccatcatcactacctaatttagatgctatacttttagatcttaatttcttaccggaggaacttgaacctgcaattgaccacccgtcaccattattattattattattattatttttattattactaccattactatcatcacctatatcttcattaccaattaaaatttcatcatcttcatcaatcatttcataatcagaagcacgaacatatgaaggaacatgtcttgtaactaaaaattgtttatcctttggtaaaaaacttttctccttaccattatcagcgggagaccattgccaagttgggaatctataaactaaataatcacctgcaattacaaattcctctggtgttatctcacctgaagttgcaaatgttgaagtatgattaattggtgccagatattcacgtaatgaagagaaccttgaacgtatgtactgtgatgtcatttagtctatctatatttacccgtatttactactgaatcgagtgacaaagctgtataaataacctcctttaaaagaaaaaggctcctccaataaagctctctcagaaaggccatcgtaaaactgagacaataaaatcaggccgtaaaaattagaaattaatttactatggggaatgcgagattttacagtactggtattaattacctctcttttatgagcctttccttttcaagttggtctgtttatttagagtgcattgacaagaatgaccgttagaaagagaggaaaaggtaagagtaataagaaaggtagtggggagaaagtctctgagggggctaccagtgctgatttccagaaaattgacaagttaattgataaaaccgatgaacaactagacgaactcctgcatgagaaggaggaagcaattgaagagattcataaacttgaaagtgaagttgagaaaattgatgataagattcaagatgttgcacattcacagaagaaatatttaaccaaaaaggctaataataacactattggacaacatttttgggaaaagagaagatttgttttagttttcggtattattattggtttattcattgcggcttatagtcataaagaatatatatcatctgatatattatcaggatttgatgaatatttaaatttagattcattaaatttagattcactttcacttgaaggtgttgattggaaaggttatttacctgatggattattaaatacaatggaaaaacgtaaaactgaggcacaacaagagagtggtgcatttagtgttggtttacaattaaataaagaaggtactaaggcaaaacataacgttgtaatggttccaggagttgttagtacaggattagagagttggggattagaaggtagtagtgaggattgtccaagtaagaattattttaggaaaaggttatggggttcattttttatgctgcgaaccatggttttagagaaattatgttggattcaacatttagaattagatccagagacaggattagatccaccaggtgttaaattaagggcagctcaaggatttgaagcagctgattttttcgttacaggatattggatttggaataaagtattacaaaatttagcagcaattggttatggacctgataatatgtttagtgcagcatatgattggagattagcatattatgatttagagagaagagatggttatttctctaaattaaaggcacaaattgagacaactaataaattacaaaatgaacgtacagttttaatgggacattcaatgggtgcacaaattgcattttattttttacaatgggttgaagcaccaattgaaaatggtggaggtggaggtggttcaacatgggttaatgatcatattgctgcattagttgatatatctggttcgacattaggtacaccaaaggcagttacagcattattatcaggtgaaatgagagatacagttcaattaaatgcaatggcagtttatggtttagagaaatttttttcaaaacgtgaaagagctcatttattacaaacatttggtggtataccaggtatgttacctaaaggtggtgaaaaattatgggggtcagctagtaatggagcacctgatgataaaattgttggtaagggagagaaaagtgttattgaaggtgatgatacatttgcaaactttattagattaattggagaatcaggtgataaaaatttaagtattacagatagtattgaattgttacttgatgaaggacctgaatggtttaaacgtagaattaatgaacaatattcatttggatatgctaaaagtgcaaaagaattaaaaaagaataaattagataagagtaaatggagtaatccattagaagttgcattacctaatgcaccggatatgaaaatattttgcttttatggagttggtaaaccaactgagagagcatatttttataaagaggatgaatcaggtccattaggtgttagtattgccaatgagaatccacaaggtggagaatccgttttacttggagaaggtgatggtacagtttcaattttaacacattcaatgtgtcataaatgggcagaagagaatagtgattataatccaggtaattctgaagttataacagttgaattaccacatatgccagatgtatttgatttaagaggtggagcagatacagctgaacatgttgatatactgggatcagctagattaaatgaattattattacgtgttgcaagtggtgaaaaagttgaagagagacttgttactagactgcgtgaaatagtttctgaaatagacttttttgagtagattatactaaaaagataatagaaggttaaatttaaattagtataaacataaacaaagaaacattaggaacttgatgtgagttaggaataaaactaatggaatgaaaacaatagagacaattagagacaataacaaatgaataaataaagaataaataaagataaaagtaaacaaacacggtaagaaaatagaagaaaacgcaatttttttgttgacatttcgttcccaatgcggaatttgccatttcaatttcaatttgaaatttttcttaaacgcgtatatgcttttacgttacttgtcacatcaagtatactactactaatactaactatctagttataatactttaatactttgttgttattcattagaataaatggctttggttgcacattcaacacctgttaaaaattcaattaatggtatagataatttacaaactataccattacaaccacctgttatgaattcagttcaattatcacctcgtttaagaagggctagattgattaaaatgaaattacaattagcttattataaagtacgtactaatcaaactcatattccaacttcttcacttaaacttaatggtaatgataaagttgaagatagtttattattgaaaactgcaaaatttgaacccgtggagaaagagaaagtaaaaataagggagaaagagaatgaagttgaagatgatagaattgataataatgaaactattgatcaaagttgtgataagattgataatgacaatatcattgataaaacttcacttgaaaaagttcaagtatcaaaacactcaattaatgttaataatattcaacaacgttcacattcacgattagatgatgttgtaattggtaaatctaaatctaatagaaagtcaaattcaaatacaaataaaattacaaagccatcaattaattcacaaaattttagattatcacttacatcaccatcaagatttgcacatacatctaaattaagtacaaagtcaaaaccttcaaatattttcattccacgtccacgtaatattttcaatacaagtttaacaatgagtaatggttctatcaatagtgctaataataatgctaattcaacagttgatgaagaagatttaacagttgaagatcctgatcaaacaatttttcaaacttcattaactcaatcaataccaccaccaccattatctgcaccattaataccaactgaaactccacttcgacgtaataaacaacgttcacattcatttagtaatgatacaatactttcatcaccttcaagattattatcaacaccttcatcaattggagctgcacgttgtttattacaattagcacatagataataaataatagatttagatataactagcatttttataacactttctttttcaatgatttttaatacactcttttaattcaattcaatttaatttaattttacaaaaaactttacaaaactttatccttttgctttggtttaaatattttcaaagcactctctaatccaatacctgcaaatactaaaataataccaaaccattgagataaatttaatgaatgaccgaaaagaataacactaattgccatacttaacattttccttgtaactgtaacagtaattaaaacaactgaactaaatttctctaatgttataaatataaatatttgaccaattgcaccacaaagtgcaaattttaataaatcatagataactgcatatccattattcaaaacaaatgtctttatataattaaattgatctgtgaatgttaatgtataaattaaaagattgaaaaatgtacaaatatttaaaccaaccattaaacaaccaccattaattgaattatcctttttcaacataatatcttgagcagaattagtgaaaccatctaataatagagatgcaattaataatataaatccataaatttgatcattattaccattattattatgtttatttgattttgaacttgaagttgcaattgtgaaaattgatacaccaatagttataattaatgcaactaaatattttgattttttatatttagtaccaaataaaatataatgaactaacataactggtataagtttacaacttttagttaataaaaataataaataatcaacataatttaatgaagaataagataatggtgatgaaattgtctgtgaaattgaaataatgtataaattgaaaaatgatttaccaaaattgtttaataatggtttataatcaccaattgttgtaatataaatagttccaattataattgagaataatgattgaattatatgaataattaatggagatttaaaataagctggatcaattgatgaatttgaataatttgatgaagttaatttttcttgtaaagtaagcccaatataggaaagaaaagtaaattcctacaacacatattgccaactgtacatgtctgttcatccttgtcttaatttgaatgatatataatgagatatagcagtataaattgaaggaaaatacacgtataaatagagataaagtcgataaagattgatccgaaaagaatgatgtgtcaaagtggaaaatttattgaaggcttaatattattattatcagctgttaattcttttcaatgtatgtataggacattatgattccaattatagtagggttcggggttactatagtggcactcacagctaaggcaactattgagacagttagtcgatgtagaaggttaactaattttgaaattgctagaatgaatggtatttatttgcgtaatgttagtaatggtggtacattttgggataaattttattccaaggatccagatatggcaattggtggatttcaaactgatgttgatgttaatgaagcattagatatattagggttaagtaagaaagatgttttcaatataagtaaaattaaacaacgacatagagaaatgattatgcaaaatcaccctgatagaggtggtagtgaatatcttgcaatgaagattaataaagctaaagaggttttaattaaataatgggggttatgtttataaatggttattttaagtaaagattatatataaaagaatagtatagagtagtatttgatataatataatattcatttatcagttaatggttgcaatgattggatatgaggtatatgatgagatctcttcctacgagtttgtggtttagtagttgatggtacaataggacaatcattccaaccctctattgatgaaggtgcaaattgataagattttagtggtggttttgaagatgaagatgaagatggtggtggtggtggaagaggagatgatttagtttgtgaggatggtaaaggaggcagtggagagacactctccttagtttgagcagtgttactgttactctgtgaaggtgcagacattgtccttgtaatgtaataagcagtaagtggtaaaaggtgttctcttcattttgagatttcaatttttttaatgaaattttctctttccttaaattataatgtttttaaactttaatgtatctgcttctttaggtatacaatgtcaattactacatcaacagagggtattaccaagtgaaggtaacaatttggcacttattgcgtcacattctcatattacaggtttaggattagatgataatttacaaccaagagagaattctcaaggtatggttggacaattaaaggcaagaaaagcattaggtattattttaagaatggttgaagaaggtaaaattgcaggtagagcaattttaattgcaggacctccaagtacaggtaaaactgcacttgcaatgggattatcacaaaatttaggtaaagatgtacctttcactgcaattactgcaagtgaaattttcagtaaagaaattagtaaaactgaggcattaactcaaagtttccgtaaaagtattggaattagaattaaggaagaaactgaagtaattgaaggtgaagtaattgaaattcaaattgatagatcattaactggtggtcataaacaaggtaaaattacaattaggacaactgatatggaaacaatttatgaattaggtaataaaatgattgatgaattaagtaaagaaaaaattattgcaggtgatataatttcaattgataaaagtaatggtaaaattattaaattaggtagatcatttagtagagcaagagattatgatgcaatgggtagtgatacaaaatttatttcatgtcccagagggtgaattacaagttaggaaagaagttttacatacagtttcattacatgaaattgatgtaattaattcaagacaacaaggtttccttgcattatttagtggtgatacaggtgaaattagaagtgaagttagagatcaaattaatttaaaagttggtgaatggaaagaagaaggtaaagcagatataatacctggagttttatttattgatgaagttcatatgttagatattgaatgtttttcatttattaatagattattagaggatgaattttctccaattgttataatggcaacaaatagaggtatttcaaagacaagaggtacaaattataaatcaccacatggattaccattagatttattagatagaagtattataattcaaactgaaaattatcaagaagatgaaattgaatcaattttaaagattagatgtaatgaggaagaagttgaaattaataatgatgcaattaaattattaacaaaaattggagttgaaacatcattaagatatgcatcaaactttaattagtgttagttatttaatgagtaaaaagagaagaagtaatgaaattgaaattgaagatattaagagagcatatttattattcttagattcaagtagaagtgttagttatttacaagagaatgaatcaaattatattgatgataatggtaatgttgaatttaataaaagtaatggtgatggtgatgttgttatggaagtaaataactgattgtaataatttttctttaattaattatattatattatatactattaatactatatactatataaacactatgaattaccctttgtattaagtattaaaccaataatcataccataaagacctaaaacttcagcgaaaataaggataaggacaataccaacaaataatcttggttgatgcataaattgtctaacaccttcatcaccaacaataccaattgaataacctgaagcaagacaagctaaaccaacacttaaaccacaagctaaatgcataaatccattaaataaagtataattattatttggagctaaaccacctgcaattaaaactgcaacaactaatccataaacagagaggataccactcataacaacaggtataagagaacgcattataagttcatggtttaaaagtaccaatacctgcaataccaatacctgatttagcggtaccaattgctgcacctaaacatgagaaaatcattgcaaatgcacaacctgcaaatccgaaaaatggtgcaaatgcaggtgcatattcatcaacgggtagagatgacatatttgtagagataatgatcagagattgtaaaccaaaagactcaaagataaagactaaacattaagataaagatatagaagcagccattaaatgaagacatgaaaatttactctgtgagggaagatttattatattctttgagtagtgttctgtattattattattattatggataggagtagagatagagacagtgacaaggatttggtgctgccattacacgttacagaggatcagagacaagaggtggagaatgccttgttacgatggttagaagaggagaatggtgatactactggtgaaatgtttgttaaatatattgtaggtagtggtaaggaagataatattgataataccccaactgaaccattggattttgcattggctgaagctgctcgttctgctgagttacagtatgaggaaattgctttaagagtggcattattaagagctgaattgtgtaataatagtaaataatagtaaattatagtgtagtgtatattatgtataataagaggtaaaattattctttattcgataccattgagtatcattgagtatgattgttataatgtcatactataacacacaattacagtaataataatgaaacaaagtaaagaacttgaatgcattttcaagaaacaaaagtttttcaacatgtttataatacaataccatctactttcttttctattcatttctacaaatcaatcttcttagacaatgaaccaactattaactgaaatatcaacatttgtatcactcccattacctgtaatttccactggtgttacatgttttatgatcttaacatacatttcatcaattttctctccaaatatcatcagtaattggtcattatcaccaaattctttattaagtggtaatacaacttcattaacaacattcccattaattcatgttaatttcttacatttattatcaaatataattgtactttatcatccattatcacaatttgaaaattctcatggttcattacatactgctttattattaaatactttaggtgcaattactggtattgcatttacaattatttcattaattttaaattatattggtattgaatctgatgattcattaaatgtttcaattttaggttcatcaggttgggcatttacatttttaacaattaattgttgttataattcaattaataatccttatactacaatttacaatactcattataatgtaccaacaattttcttaccattaatttatcttattatttcatttatacttgttccatcaagttcattcttaggtcattttgtttcaattatattaggtgttttgatttttaaaaattatattgcattccttgcaattccaccatttaatttacttggtaaaattgaaaatttaaatattttcaaatattcaattgaatcaattttcccaattgaattatttaaatggacttgggaaaatgatgttaaagaaattcgttatcaattaactgattttaataatccaaatccaattttaccaactcataatgaacaaaatagtggtgaaaaattaggtacaaataaaaatttggaaactaattaacaaaatagtatataatataatataatataatatgataatgataagatatataactctctaaatactttatttatttaccttttaaaactctcgcaaattcttcaatatcaatttgaccatcagaatcagtatcagcagcttctaacatttgctttgcctctgcatcagttaatttttcaccaattgttgttaaaactctaactaattcagtttgactaattttaccatcaccatcactatcgaaaactttaaatgcttctaaaatttctgcttcaacatcttgctccttaatttgtctagccatcattgttaaaaattcactaaattcaatcattgaattaccatttgtagtcaatttcattaactaaatcatttaattcttgttgtgtaggattttgacctaatgctctcataactgtaccaagttcacttggactaattttaccatctccattcttatcaaaaattgaaaatgcttccttaaattcttcaatttgttcaggacttaatttatctgactatattatatattataattgttagtactaagtttactactataactcccattgcataatacataccattgctacttatctaaaaggaaaataaccctaactcattaaaacctaacaccaagtataaaccacatgatgatcttctgttaattactataaataaataaaaatttaaaattgccacccaccgcgtccgtcgcgtctgtgaactgtagatctatttcaaattactattattattactattattattattattaaaatacaaagaactataaagagagtgatataccattatactaaccagaacacatggtacatgcttcaggattatcaattgcacatgcaattaccttagaattgaaaatatcaacttcttcctcagtaccatcagccgaacttgtaacctgtagttgtagtttcttcaacaacaattatttccttcttttcttcgacaacaggtgcaacctctgctacctctgctacctcttcttcttctcctcatctctgttgattacaggaatttcatcatcaagttttaatttattaaaattttcttcaatttttaaattcttaattggaactttaacttcaacatcttcaactttatttaattttcttggaatatatttcttaatatttaatttatgtaataaagcttcagttgatcctgcacttaatgcactatcttgatcaacagtaaattgaattgcagctgctgcagcttgtgttcttaaataatacatacctgtctttaatccttttttccaaccataaaaatgcatacttgttaatttacccattgttggattctttaaatgaatattcatactttgtgattgatcaatatatgcacctctatcagcacacatatcaataattgatttttgtgaaatttcccaaacagttttatataaatctttaatctcttgtggtatatttggtaaattttgaattgaaccattatcttgaattataaaatttttcattgaatcattccataaacctaattcaactaaatctcttaacatataaggattaacaatttgaaattcaccatgctaaaactcttcttgaataaatatttgatgtatatggttcaaaacattcattataacctaaaatttgtgatgttgaagcagttggcattggtgcaactaaaagtgaatttcttaaaccatgttttgcaattttttccttaattatatcccaatcccataaattagttggctttttaccccataaatcaaattgtaataaaccttgacttgcaggtgaaccttgaaatgttgaatatggaccatccttttgtgccatttcaattgatgcctctaatgatgcatgataaattagtttcaaatatttgaatatttaattcttttgcttcttgtgaatcaaatggtaatcttaacatcataaaagcatcagctaaaccttgaacaccaacagcaattggtctatttcttaaattagaattttcagcttccttgacaggataataatttaaatcaataattttatttaaatttttagcaataactttagtaatttcatgtaatttttcaaaattataccaagttgaattttcatcactttcaacaaatgcaggtaatgcaactgatgctaaattacaaactgcaacttcatcatttgatgaatattcaacaatttcacaacataaattacttgatttaattatacctaaattttgttgatttgattttttattacatgcatctttataaagcataaatggtgtacctgtttcagtttgtgcctctaaaattgaataccataatttttgagctttaattgtttttctacctctattttccttttcatatttttcatataaaatttcaaattcttcaccataaacatcacttaaacctggagcttcacttggtgaaaaaagtgtccaatcttgatttgcttcaactcttttcataaataaatcaggtatccataatgcagggaataaatctcttgctctaatttcttctttaccatgattttttctaatatcgataaaatctaaaatatctgaatgccaaggttctaaataaagagcaaatgcaccaggtcttttattaccaccttgatcaacatatcttgcagtattattgaaaactctaaccattggtataataccatttgaagtaccattagtacctgcaatataagaacctgtacttctaatattatgaatatgtaaaccaataccaccagcagttttggaaatcaatgcacattgttttaaagtatcataaataccttcaattgaatcatctctcatagcgactaagaaacatgaagacatttgatttcttggagtaccagcattaaataaagttggacttgcatgagtgaaatatctttttgacattaaattataagtttcaattgcagcatcaatatcttcaccatgaataccaactgcaactctcataattaaatgttgaggtctttcaacaattttaccatctaatcttaataaataacttctttctaaagttttaaaaccgaaataattataactaaaatctctatcataatgaattgcattatctaaaacttctgcatgtttttgaacaatttcccaagtttcagttgaaatcattggagaaggtttattatttttcggatcaatatatttatataatttatcaataacttgactaaattttttagttgtttgcttttgtaaatttgatatagcaactctagcagctaaagttgcataatcaggatgaacagttgtcatataagcagcagtttcagcagctaaattatctaattcaacagttgtaacaccatcataaacaccagaaataattttttgagtaattgcacttggatgaacatgttttgtatctaaaccataagctaatttttctaatcttgaagaaattttatcaaattgaactggaactctacgaccatctcttttaataacgttcatatttgaagaatgggggattgtataatgaaagaaggaaaggaaaagagaataaagaaaagaaaagaagataataataaaaagtgaaaataggggggatatacgtgtttttctaataaaatgttcaaaatagatttaattactaagaaatacaggtaaaattacgcgtaatggtggcaaaattgatttacttagtaattttattctatcatactggagttaagggaagtatgagacactgacgcgtaaatgtttaagatcttagaaaaaggaaatttaaaaattttttaaacatcatagacgcgtctggccctgtcacatgacctaaaagagggttatcagttaacaagctaaaccctcacccactcctcacaccactgacaaaaacaaaaaaaggtaaaaaagagacgcactgaaaaaaatgaaaaatattaggtaatcagaaaagttacccgcgacaaagaaatagtaacttagttagtgaagtagaaatttactatgatagtaataagtctgtgataatactactatctcacaatttactatgatgaattttactatgatttccaaaagttccattttattgaattttattgaattttttactgaaaaattattatttcatttaagacattaatttaattttactttcccttcagtaacaactaaagttcaatatatacaatggctaaggtttcaaaggacgtttcatcatcaagatctaagtcaagaaaggcttattttaatgctccatcttctgttagaagagttttaatgtcagctcctctttctaaaagaattaagagaagaatatggtgttaaatcaatgccaattagaaaagatgatcaagttttaattgttagaggttcaaagaaaggtcaagaaggttcaatttcttctgtttatagattaaaatttgctgttcaactcgaaaaattaacaaaggaaaaatcaaatggtgcttcagttcctttaaatattcatccttcaaaagttgttattactaaattacatttagataaagatagaaaagctttaattgcaagaaagggtggtaaagctgaataaattttataattaattaataaattatatgatgtgtatatcttttaaaactatatttccttttagtattttatattattaataactataaatataaaatttgaaaatattttgaaaaactaagtatattatatcgttcttcaaagaatcatactttctttgtaaataaataaactgtcttcatttcaataactatcttatcactcttctttaattcaactttttcttctaatttcttactaaataatgaactaaccttttcttcatgacttgaattccatttaaatgatgaactccatgtatccatataattcaataactgttcaaatgttaacctcatctccatctttaatacatcatctctaaattcaaatcttgaaacttttccattatttccatcactattaccatcattattgaaaactgtttcaatttctccaattaatggatctctacgacacataatggtttcataccatttatcaccttcattatttaaaacaatttcattaacttccttatataatgcacgtaatttactacgacctggttgttgccaatattctccctaacttacccttttcctcataaacaaatgaattatattcatcatttgcaatcttaagtctattcttatcatcactaccttcaattttagtgaaaactggatcaacatatccccaatatgctaaaactccatcctttttgagtaatttatgcatacaatcaagccatttttcactatttaaccaatgaacacattctgctgcaattattaaatcaatctgttcattaatttttaaatcaattgtctctccaccactttgaatatactcaatttcaaaagattctaaagaatctctgataactttatcaatattaatctttgcttcattaagcatagtatttgataaatcactaacaaatatcttaaccttttttaatagtgtttcgttactattaataatctctttgagaattggaattatctttaaaatacaagtacctggacctgaatccaacatctaagatattgatactttcacttttccattgatttaaacctaaatattggaaaatatattggaaaaaattcagttgaataacttggtctatataatgcataatcatgtgaattgaatgtatttgcagaaaatgctgacatctttgtctctcagagatattgtaaacattcgaactgtcaaaagtacggacattcatcactatttatagataaacatgaagtaaactgtggagagagtgacaatctccgagtgcggaataataattatccactttaagctacgcaatttaaatctattgtttaaaatttatttataaaaattgttattatatagttatatgaaaaaatacagaaggagatgggtacattaattgaaagatatagaaaagttaaaggtataatattcataatataagggattaaaattaatagtaaatttagtaaagttaaagagagaggaggagatttttaaaaagtattaaaagatagtagaaaatataataataataaaagagaagagaagagaagagaatataataaagagaagtaaaaaagttgtataaaaaggtaaaaatttataaaagtttcaaaagtaatgtataatatactaaattcgtagatgcaatgttatgttatgtttcatgtaaaatggaattaaatggaataaagtaagatgtattaaaattatttttatttggaaattgaataattgaataattaaataattaaaatggaattataatcttgataataaaattttttgttgatctctagcccattttgctgtatctcttgtactttgtgaatattctggattattctttgccttctttaaaaattctgtaacccaaccttgtttgaaatattcaatatgtgaattactgaaaatttgtgcaatatcaccaattaatccaactgatgctctataaactgaatcattattatataatgatgaattaccataaattaatgttaaaaatgtgaaaatttgtggtaaataattaataattgcttgtggttgatcatgtaatcctgtaattataccaacataagtatctaaaactgatgattgtaatgataaaataaaatcttcagtttcaattgaatcatcttcaggttcaatactttgtgcacttaaacaaacattcattacaacatctaaatattgaataaattcaattccaattgatgatgcaatatctccaaaacatgataaaattaatggttttaattcacgacgtgtatcaatatttgttattatattacctaaaattgacataaatccttgacaatatggtatgaatgaatcacctaatgaatgtgaaatatcaacaactaatccaattgctgaattacaaactgttgaatcgacattttctaatgcttttgttaaaaatggtaaaaataatgacatatatttttcaaaatttttattaattgcacttgcaattgcagaaattgcaataaaaatatcatcttcaataattgaatcatttgattgaatttgtaataattctaataactttggacattaacatatctgaaacattatttatattagaatctaatcttctaattatatttgttaataatgataagatatttgattctaattcttctaataatgctttatcttcacttgaaaaattaatttcacccttttgtgattttatttggaatattaattacatgatctaatctattcattgtttcagttgcaattgattcaatcattggataatcgttatcagaactatttaatacaattgctgataatgtttcatatgctgaagttcttgatgaatattcattatcatctttagctgataattcaactaatggtggtataattaaattcaaatatgatgaaataatatttggtgaacctgattcttcattatttgatagttgttcagttaaattaattaatgtccaacaacaattagttgcaatttttggatgatcatgtaaaccatcaattaaagatttcataatttctggtaacattgtattaatatcaattgcatcaacaactaattcagcaattctacctaaacaccatgaaacagtttccttaacttgtaaattttcatctttaattaattgaacaattggtggtaaagcttgagtaattaaagatttcaattcagttttatatggaccatctaaaattgaaccaaatgccataactgctgcttctctatttctccaattatctgaaggtaaatttgcttcaacaaattgtaaagttggttgaacgacataattaccagtattttgtgcaaataattgtaaacatgcagctgctgccattgaaacaggtccaagtatcatcctcaaaatcatcattttgttttgttaataattctaataaaactggtaaaacattattaattgcaattaatgcaaagttatatgaaataaaatcttcatttgaatctttatttaattgtatatcaatttcttcttcacaaactgtactccaaaattcaactgccatacatgaaactctatcatcagatgatctcataccttgaacagttaaattatataatgctttttccatataaactgacatataatcataatataaactcataattttagctaatgcaccaaatgctaaagcttgtaattcagaatcacttgaagttgttgcttcacatacaacttgcattatataatttctttcaccttctctttggaaatttgattcaataaattccaatgaattaataagtgcattaagagcagtttttctaacaattaaagattcttcattttgttgagcaccttgaacaattgcaattaaaataccatttgaataactttgaacaacaggacttgaaggatcgacagcttcacaaatataaccaattgttaataatgaagctcttttaacattaacaggtttttcaggtttagtattttcaacaattatatcaattaaatcattccattcagatcttggtaattcaatttctgcaattgcagcaactaaagttgcagcttgatttgcaactctttcatctgatgataataaagtattaagagtaattgatttaatatgagatttagtttcattatcaagttgaatccatctttcaacttgttgagaacgttttgattgatcttttgaagttaattgatttttaacattaagacctgccaacattctaatttcagttttagcagattcattacctaaaacttgaattaatagtccaatatattgaatccaattttcttcacataatttttgtaattgttgttcagcattttgtctgactgaagtatcagtacttaaaattgcactttctaataaatttgaaatatccattgtaatttatagtattatgttatgttatgatgatgtataaatgaggttttttaaactgtgttgtagttggataaatattcaagtatattgatatatttgtttctatatttatattttatttataattatctttaattaagcttttatcctaatatgaaatataataaatttgcggatatgagcttttaatatagacaaatttcaaagtaatttaagagtgaaaaaaaaaatgtacaaaagttcaacgacgcaacccagcaataacaacagctgaaatgtgacttgtcacaaagtaaaatcagtaaagaaatacctaaatgtaaatatttacagattataaaaattataaatttgccattaaacatttcgtaattgtcatgttccaaaactttccaatggcgaaaattttcccaccgtcgcatcgtcctctatacggtatttatccactcttcaactgccatctccgtacggaacatggtgagttcctcgtaggatgagtgttcactgtatgggacaggtactctatgaataacacctacccctgattgacctttctcatcagcactcgtatgttgaaaccctcgttccaatgaatccattaatgtatctgttggtaatgtatacccaaatgtccatcctgtaggtctgatcactatagcagatttaaaatgtgatgaatatttctgtaaatattccttcattgaatctttccttgttttactaatagcaactaaatgaactgaacattcatgtgccttattttcatcacttactattcttttagataatgattcccaaccaaatgtctccataattgattttttctctggagtgcaataaataccagtatctaatgcttcagcaataccaagtgcaagtctttctttaccaatggaatacgtaccaacaataattaaaaattgtttagcagcattattacccttactattagtgaaaaattctaatattctactctgtttagccttatatgtaacacatttatcacgtataaattccacttgctgtatttataactaattcctgtggtgggaaaatatatttaggattatcataagtggtatccaaataacatttattgaatccacttggatatctctcctttaatatatctatcatctttttatttgctcggaaatctccacaatgtaaatatcttaacccattacattctaaaacaaatatacctgcacctggacaatgatttgcatcatatgctgtaatttttatattagtatccggtatttgatgttcaactccttaattttcaatcataaataatctttcatccggtattttatatctaagttttaatagcttccccgtaattaatgtgcatacaattaatttcccattatcccacgatttacaaatcccgccataatgatcagaatggaaatgtgttagtaagtaaactgatattctgacattcatacaaaagcaaaatgcatcaactgctatgatatcttcaggttttgattggaaatcaagtattttcatatcaggtataggtggtttcggtttacctcgacgttttttaggttgtggttgtggttgtggttgtggttgtatttgttctaaaatttctaattgattttcagttttaatctctatctccgccttcgtttctatctctgatttaactttggtgtttcttttacgtttaactgtggttgatttctttttctttacttccttctcaatttctttcttcggagattcataaacatatggggacttaactggaatatcaatacatcgattaatatgtactgatctagcatctgtatgaaatttagtgagatcaaattcacatatgggacacgaaaatgtttcttgttttatctctatttctatctctttaattttattatcttccccttcctgtacgtctaccttcacttcatttttcactcttttattcctttgaaaactaaaatccagtatagatgtctgtctcttctcagaagttgttttcattacttactttcttacagtaccaaaaagaaaaagaaacgtctcggagtggatcaatttgaaaaatttctttatcgccgctacttattggaaaattatatttttcacttctataaaagattagataatttattttgttgcttcagttcttcaactatttcatcaaagaaccaggaacaacttacatattcataagttatatctaaatcaatatcacaggaacatctattttcaactcgagtctctaaatctaatggacattgaagatatggtgcatgttcataaccaatatttttcaatctttgaattttaggatattttaaaattgttgataatatcaatgtacgaattggtgcatcaccccatctttcataataaaatccattatatttatccaattctttgaaaactaaattatactcatcacttctaaatgtatttaaattaccaatttcaaaatttgtccaaaaatgacataaattataatcactattatccatattgaaaataaattttgaataattttcagttgatgttaataaagttgacatttttaaatcatccagtgattgaataaatgattggaataatgatggaatagttttaggatattctaacattgaaattgtaaatccataatcaatttcattatcaattaaatatttgaaaatatcataattaatatcacaatgtaatttaacaccaggttcaactctccaaaaataatcataatctaataaaatttcatgccattggaaaaatcctgattcaaatctacacatatttctataacttttagaatctgcatatggatataccccttcagggtcatttaatgctttttccatattttcatgcattaatttgaaatcaactgtttgtggaattgaccacatttcttcagatattaatccaaatttagcagtacctgaaactgcatttgaaactaataatttaaactcttcatcaaatggtaaatcatttaagaaaacccaatcataatgaaatttatgattaaatctagcttcataattaataattgtgtctaataattcatagagatcagaatttcgacaaagtgtgtataatgttgaattagttaattgattatgatgttgttgttcgtcgatgaatttatatgaaaatgcaaaattaatccatagaaggataattggatataaaatgtttgatatattagttagcatagtgtaatatattgttcaattaggtattaatgtggtatctggaatgctgttggtatgatgtttgtataaatattgctatgctatgctaaaaaataatatactatgctatgtgctatgctatgtgctatgctttttgatgctaatgctaatgaattctataaaaaggtttgaacaaaaaaatgtcttatctgatttactcttatgtctggtctctaatgacactggtaatactagaaatgagttggaattatgataaaataaagataaaataaagataaaatcaaatgaaatatctctcgtctatccctgtaaaccttaaatggttattttttatctttttcaattatgaaaaaagtgatatgtaagaatgtaaaaaaagttattaatgtactactaccagtgtcttccgtaccagatcaccaaaaactcttccctacttaaagaaataaagaaaagaacagagaatatataaaataaaaagatgaaacaagttccaagagaaagaaccgttttaaaggtttcaaaggcttagtagactcaaatcttaaacttaaacacgtaaaaaatccatctctcggcacacctgccctttcgggccactgtggataaattttattactaagttcttctctggaaggttctcacaatgcacattgcatgcagatcctattgcttcctcctattggacatcgttatgtcatcccctgcaactgcgcaaaagcttaaggagttttattctcgtgtctctgtttggaaacaactatattataaatggagaggacttaagggagttccattaaggaagaaatttttcgttggttatgatttagatgcaaatacttattgggaatatttccaagatggtaaacatttaagacctcgtcgaatggttgagccttatgaacctcaaaaacttatatttaattattttgataaagttccaattcaatgggctcaatggttaaaattttcaagaaaaactccaccttcaattttcgatatattacaagatgaggaacgtgtaaggaaattacaaataatgtctcaatttaaagaaggtgaacaactgtttaataaggaattacatcaacaaagaattgaagaaaatttaaacagagaattagggaaaattcaaaataaaaacgatagagagaatcaatcaactgcagaaaatgccgctattgcaatgcaaaaatctggttatgatttaaataacttatctcatatggaaataaaaagtaaaaataatgcaaaacttgaaactgatgcatcttcacttgctgaagatccttggaaacaagctgcacattctaatgatcaacctcaagaagctacttttaaaccacgcagataaatctaatgccctgtacatgtatatatataaataatcccatatgtttcttattattcttactgtttccaatatcatttcttcatatcatttgtgtataatttactaatttaaagatcaaaaaaaaaattaccaccttcctaattgggccattttggcgtcccttaaaatttaaatcaacaattttcatgttaacattttttaaacgttatatttgatccatgaagttcttaatgaaagatttatattatcatctatatatcaacaattacgacgattcaaagtggaataacatatgcagctgccggaagatttaaaacatctttttttaacatggattcaagcagaatatagcattaaattacaaatgcagagtaagatggctcatacttacggtaatgcaatgaaaagtttgaaaacttgtccaatgacaattaaacatcctgcacagttaatggatgtgaaattctttggtgataaattggttaaaatgatgcaattacgattagaggaatattgtgaagaatattcattaccttatcccgatatacctgaagaaatgaaagaaaaggaaagaatacagaaggaaaaagaggaacgattgaagaataagaataagaataagaaagctaaagaagtagagaaagagggaaaagaggcagctaaacgttcattagattcatctgatgacacagctgcatctaagaagaaaaagtctacaaagaaaaggtatgttccacaagttaactcaggaggttactgctatactgcttgtattatttcttcatgataaacatggtacaggtatgacaaaaagtgaaataatcaaatttggggtaaattattgtacatcttcatttcaaaataatgccagtacggggagattttataatgcattcagtagtatgaaaacattgataaaaaatgaatatgtggttgctgaaggtagacctgaatactattcgttaactgaagaggggagagaggttgcctaaagttttaaatgaaatggaaaatgctaatccatcttcaattgctgtaaatactagtagtgtaaatagtacacctcgatcaaatcggaaaatgaatgaaaaggaaaatgctagactcagtagtagcataattaaggaaaaggaaaaagataagaatccattagctagtagctcaccaaatgtcagcagaagtaatgccttttcttcaagtccattacgtgggggatcactagatgtacttaaacataaaaaggataataataatttgatggtatcatctcctctaagaagtgaaacacatttgcataataatacatcacataaatcagaatatcaagtttggaaaccaggtacttataagataaagtttttacttgataatcgtgaaattttctcaaaacaagatagagcggttttcggtgaaaccttaaaagctagaggtattgatgttgaagtaagatcattacctgttggagatggattagtggatagccgttaacaaaaagtctggacaagaaactacattgaattatatatttgaaagaaaaaggttagatgatttagttggttcaattaaagatggtagatatagagaacaaaagagtcgattagagaaaactggtatgaaaaatatttattatatagttgaggaacaaataaatacaggagaaatgtcacaatccatggaatcaattaaaactgcaatgtcaatggcaacaacatattcaggatttcgagttaaaagaactagaaattcagattctacattgaaacttattgaatcattacataaaattataactaatatacacaaaaaaactacattactggtattagaacctagaaattatgatgatatgatgaatgttcaaggtggatatgctaaaattttaaatgcaatgcaaactacacattctgataaagaagttgtttatagttataatacatttgcatcaagattaggtaaaagttcagaattaagagttaaatcgcaatttgctaaaatattaatgtgtataagaggtattggaatggataaagcagcagttatttcaggtaaatataaaactcctcgtggattatttgaagaatatgaaaaagcacatttaaaaggtaattgtcgtacattgattaaagctgctaccatacaggagacgggagcaagaaaagttggtgaagcattaagtggtaaaattgctttagtgttctgtacacaatgtggtaaagagaagtcaaaagataaagataaagaatctttataagatgtgtaatagtatttaactggattatgatattattactggtttttttttcataaaaggatatattaaaaaattgtatatagtgtgaatcaattaaacaaaaagatagaagtaaaatagtaatcattaaacaagattaagctttattggataagaaagtaacaccaggtaattctttaccttccaataattcaagagaagcaccaccaccagttgagacatgagataatttatcagcagcaccgaatttctttgcaacggttgcggtatcaccaccaccaataataacggtattaccatttgcacaagatttaacacaagcatctaacatttcctttgtaccctttgagaaattttcaaattcaaagacacctggaggaccattccaaacaattgtctttgcttctgcaattgcagcagtaaattcttcatttgattttggaccaacatctaaacccattaaaccatcagcaatacctgattctgcagttgcagtaccaacagttgcatcagctgagaatttatcaccagtaacataatcaactggtaaaaagactttaacattatttttctttgccttttccattaattttggaacaatttcagaaccttctttatcaaataatgaattaccaatacttgcaccattaataactttattaaaagtgaaagccataccaccaccaataattaacatatcaactttatctaataaattatcaataagtaagattttatcactaactttagcaccacctaaaattgctaagaatggtctaacaggattttctaaagcttttgagaaatattctaattctttagccataaggaaacctgcagctctttgatctaattcaaaaccaaccattgatgaatgagctctatgagcggtaccgaatgcatcattaacgtaaacatcagctaatttagttaaaccttgtctgaatttttcaacatctgccttatcagctttaacttttttaccatcagcatctttctttgaaccttcttcttcaatatgaaatcttaaattttctaaaagaatgattgaaccttcattcagattctgcacatgctttttcaacttctggaccaacacaatcatttaagaaaagaacttttttatttaataatttttctaattctaaagcaactggtttaagagaatattttgcttgagcttcaccatttggtctacctaaatgagatgctaagacaacatattttggcttttgagataaaacatattcaattgttggtaaagcagcaacaattctttgattattagtaatcttatcaccatctaatgggacattaaaatcaactctaacgaagactctcttacctgcaacggtaagatctttgactgataatttatttgctaaaggacattgtgtgtgtgttatttgtgtatatatattctaatacttataaaagtatttctttttggttaagggaaaagaaattaataatattagagatcaattgagtttaaacatcaaaatatcaaataagttgtacaattgctcctcttttatacctgaaataccatcgatcatcttaggggggtgaatatggcccggaaataaataatgaccagcgcatgaaaaattagctttttctggaacaattatttccctgtgtgggttaatattaatatagctccgggtggcatgataagcatgtctttacgtaatgactacaactataagtctacattacaactaatacagtacaattacaattgtaataataataatatgtaaataaatagatatattgaataaataaatatagatagagtatttatacttcgaatcaagtcattaaagtaaagaggaaagttgaaaatattgtattattttggtttttttatagtttttcattgtgttttaaattttcatttaaatcaacacaattaatctaatgatgaagcaccagtaataatatcaactaattcattagtaataacagcttgtctagttctgttatataagatagagtatttattaatcatatcacctgcattctttgaagcattatccatggcatttcttcttgcagaaatttcagatgcataaccttctgccataccagcgaaaaattgcattagttaaagcaattctagctaaagtttcagttgttccattatcatcttcaatatcgaaaacagctaatttggatgaagcatcaattgcagcttcagaataaatttcagcagctgatggatcaaatgagacagatgaagtaaatttattgtataaaacaacaactttatcataagtacctaatttaactaattcatcaacaattaatgaagcttcattgaaatgatggagtttctttaccaacaccattaaatgccataactaatttatctgcattacttcttaaaacttgaactttagttttatcaccaattgctgcaacatcagcatttggatattctgcaattgttgatctaacttttttacccatttgtgaatgaattgaaccacataaacctttatcagaagtaattgcaactaattaaagttctatctgaaccttcaggaagttgagtttcagcaattttaaaaaaatctaaatcagattcttgataaactcttgaacttgtcattgccttttgagctttacctaatctagttgaagcaacaattttcatagttttagtaattttttcaatatttttaatagattttaatctcatttcaatttctcttaaagttgcatagtttcttgccttagcagatgaaacacgagcaatttgttgtgcaccgattctatacatatttgggttattagttgaatgttaaagtaaagttaaatcaaatgaattcctacttctactcttccagctgtaaactacacattcaatttcatattaacaaaattgtccaatttcaacacttaggtaaaaccgcgaaattttcttcacagtggatgaatctcattggctaaatttttacaaatttttaaaaatattatattgagacagtcgcatcgtcccgttctgtgagggctgttgattatgtaagatttataatgtattatttatgattatgatagtagtatagagtttatttatatagatctagataataacttataagacaccattccatccaagtgatttaagttcttcacgaactgctccctcagtttgaattttaagtttttgagtatcttcaagatgttcaaaatttgcatctttttgtttaagtatttcaattgcacgtaatttctttaataaattacgaattttcttttcttctaatgatacaacacctccaataactaaatctgatgcattattagattgtgattgtgattgtgattgtggttgtggagatgttgatgttgatgttgatgttgatgcagtggtttctcctccttccccagcttcctttttatttgcacgttttctacgatttttaattgcagatttactttcaactggtgaataacctggaattacattattagttggaattttaggtgcgtaaccgggaattgatgacattgttgatttatttgaataaccattttgcttttgttcatgtaaatcaggctaatgatctacctgatacaatattacttgaacctgataatcttgcatgtggtggtctataagcaccagtttttttaactgaatcattttttttaaattttgataaataatcaattgcagattgatgaggttcacaatctaatttatcagcttttgaaactgtaattggtgggaaatcatttaatggttgatttctccaatcaatattaaataattcttcaaaacttttataataaactaatgaaccattaaaataccaaattttaactgaattatcaactcttaatcttggacttgtagttgcagttaaaatgaatctaccatcaggtgaccatttacaaacacttgtatttgatgctttaaaagatttaataacattaaatttattttgtctatctaatatatcaatatcaccaggtaaattaccaaaacctgcaactaaaatatattttgcatgaggtgaatataaaattgtatttcttgaattttttggtaatgaatgaattgaattaccacgtgaatcgaaaaatgttgtagttgcaggcatgaaaccataaataacagcaaattctcttgaagttggtgaccaagtacattcatgaattggaccttcatgaggtaaattaattttttgaacaaataaacctgaaatatctaataaataaagttgtgattcaccataataacttttatttgatgcatcaacatcagttgtaactaatgctaataatgaagtacctaatgaattccatttaaatatacatgattcacccttgaagaattgtttctctgaaactgttgattttaaatttaataatgagaaaacttttataaatgcaggattaccattatttgcaggtataaaaattgcaattgaaggatttttaccttgagataatttaaaatcttcaattttaccaaaattttttaaatctaatgaattaaaaggttttgataaatcaatttcaatatttggactaattttaaaaaaatttaatgaataaggatttttataaaagcaaataattgattcatcagcagtaaattgaggtatccaatttgtttttgatttattaaggaatgaatgtataattttataatttttatttattaaatcaatataaattatattaacattttttaaataattattatcattttctggatctttaattaattttgaccaagttgtaatataattaccatttggtgaaatatctaattcgaaaacgtcaggtatattaatttcaaataaatttaaacctgtaattgtatcaactaattgaattgaatttggtaaagtatataaaaatgcattaccatttgaaacatattgagcacaacgagtttgttcattaccatttggtggtacaaaatttggtaaatctctaaataaaggttcagcttgaaatagagaaactgattttggttgacgacaaaagaactgtggtactttagcagagtctgacattaataaatgaggatgataaatgagagaaagttttaagaaacaagtaaataaaactacaaaaagaaaaagaaagaggtttaaaccaccaatagatgttagcaaaaacaccaaaatcatagtcaaagtgtcaaaaactggaaaaaaatgatttttttcgtcgagaaattttatattagttattagttattagttactagagggttaggagataaataacttcattagagtgatatataatatgttatataatatatactatacttacaatatatacatcatacttactcgtagatccaaccgtacatttcagccttataatcgactaattcttcctttttgaaccaaagagcaatttccttttcagcattttcaactgaatcagaaccatgaataatatttctacccatatctaaagcgaaatcacctctaatagtaccaggagctgattgaagtggattagttgcacctaataaaactctaccttgtttaacaacatctttaccttcccaaacagttgctaaaactggaccatgacatcatataagataaaagagatgggaagaaaggttttgattgtaaatcagcataatgttctcttaataattcttcctttgcattagttaatttaataccaactaatttgaaacctttttgagaaaatcttcttaaaacttctgggaagacacctctttggaacaccatctggtttaactgcaataaaagttctttcagtgttagacattgtaatacttgtatgataaaagagaggaaataaatagaaacccaaaagaaaagacctaaaagaaagtacactctaataaaacagaaaacgttgtccgttaataaaatcgtccattttccatttcctcgtattaaattaattgaagtaattaaattaaagtcgcggcttgataaataatagggtttttgccttctctctgcttctcttcttctctgcttctttccttctttcaccactgctcttataaggtatatattacaaccactggatactgtacttgtacttcctattacctatgttcacttactaacattcacccacactccctttcgtagtgttttaatagcatctatttatcttaatttagtcaattatattctcattaaactatttttttcattccattccattctgctgagcctccacttacaatacaatgtctttaaatactacatctgagccatcctcctctgttaatgctgtaccttcaacaacatctcctcttagagatagagatagagatcaactctcacctattgaagaatctccaattataaaagactcaatctcatctcaacctttaacattacatgaaagagctgatttacaattagctaatgagcctccaatgccattaccaaaacaacaatattcatttaattcaaataataattccaatactaatcctaatcctaatcctaacattagtactaatactaatacaagtaatagtagtgcatctaccactaccactaataacaatgaattattgcaatatgattggcaatcattatcagattcattagattttgctcataatcgttatcaaagtgatgtctcaaatataatggttaaattagaacaattagatgctcgtacatcaatgtggatggaaactgcaattagaatggattccgtacgttcaacaactcattttgcaaatgttagaaaattggtcaattcaatcatctcaatatatcaatcatcaacagaatggtcttaatcattcaattcattctattagaaatactcttagatctttatagtattgatactataatatattactaatctttgctattcatataagaacataaatttattatcattgattccatagccattttactattatggcgtgaaaatcacaaatttcaaaatttcaaaaattatttttttattatttttatcttgattttaatcttctacttctttctgtatcgataataatatacccaataaataccctattagtatgactaaaaatgatataactgataatactaataataatactaatacctaataataagaagagaagtaaagcttgtttgaattgtaggaaagctaaagttaaatgtttaaaatcttcaacttctgaattaaatttaactacaactccatgtaatagatgtgtacttcatggtttagaatgtgtttatgaatataaagtgaaaacttatacttctgcttttaaaaaacgtcaattagatgaaactttaccatcctcaaattcaataataactccttcattacctgcagtatcatcaccacttaaatctgattcattatctcaacctattgaacaatcacaatcacaatcacaaccacaatcacaaccacagctacaaccacaatcatcaaaatggaaatcatctattgaacaaagattagatggattgggtgatcaattagtttcattaattgataaaattaattcaactacaaatacaaatgattcacaattatcagttaaaaaatcaaagataaatgatttaggtcaatcattactgaaattatcttcaaacattaatgaaaatacaaatacaaatacaaatacaaatacaaatacaaattcaaatattaatatttcatcaatttcaaatccaaatccaaatcctaatatacagattcaacatccacttcaaaaacttcaactgattatcaaaaagatccttcatttccatcatactaaaaatgctaaacaattatttgtattctttaatcaaaaaatttcacctcaattatttggttttgatatatcaaaatattcctttgatttaatatggaattcatgtcctctattggttgtaactatttcatgtattgcatcaattcatcatccaaatttaaatcatttatcatcatcattagaattgttaatttataaaatttcgaataaattattatattcatatcctaataatcatttacaagcttttaatacaataattgcattagttttatgtggattttggtttaaaaataatcaattatttacaggtttagcattacaaattgcaaattcttttaatttattaaaatctaataaatttaaaaatatttcaaaatttgatcgtttaaaattatggtatttattatatattttagatagtcaacaatcattagttttcaatacaaatacattatttaataatgatgattcaactattttaaattcaaaaaaattattatcattaaaggaaaaggaacaaattgaggaaaaagaaattgatgaatcaaatgatatcccattacctatggatattagattattatcacaattagaatatcatcatgcaattaatgcggctttctcaggtaatggatgggatttattatcaccaaataaatttggtttaccatttaaaactaatttacaattagataaatggatggttcaatggacaattttattaaatccttttaaaaacataccaatttggtcatcaaaatcaactctaatttattataattttgctaaaatgtatatcaattcattctcaattagaaatttcgataatttaaataatttaccttcattaaatgatttatctaatgaagaaagtgatgatgcattagagaatgaaataggaaatgatgagaataaaactgctaatcatattgacaataaagataacaaagacgatgaagaggaagatgatgatgaggaggaggaggagggagaggattatgatgaggatcacagttcaagcaatgatgaagatgatattgcaacactttctccacaacaaagtcatagagttgcattatctgcagctgaaaccattcttaatctagtcgttaatgatcatgatatattgaataatttgaaatatgttccagttcatattcatataatgttatattatgctgcattactgattttaaaacataatacaaatattggtacaagtaatcaaaatgaatcagttttcacagaatctattaagtttattaatcttgtaaagaagcttaaagtatccatattaaacaataaaccaattgataaacatttctccctaaatttaataaatcaattagataatttaataattgataaaattaattcattaaaacctgttttcaattcaacttcacaattacaaatcctaacaaatatacagaacactaataatcacgatctacatcaatcagatggatcagatgatggtaaacagagaatatcagcttggcccggtgtcgatgccagtcatccatttaaaaaagttgattaaatagggcaataatagaattttatctttagatgttataccacgtacctttattatataccaaactatagcattgcaagaatggatagtattaggaatacccgatatatcatggagtgatatcactaattctgttactagagtatgtaaaatagaatatcattacttgaataatatgtatactaacaattagaattttgtataggcacctcaattaataaaacatcaatatgatgagttcttgggtaaatctaacagtgataatgatttaacaatgtctagaatcaaacatacacgtgaaataatcaaacaatataatgatttacagaaatatttctctcaatataatacatctgtttgtgattatgttaaacatctgttaaatatggttattcaattcgaaaatatcttggaattagagaaaaataatgtcagtggtattgtaatcaatattgaacagagtgttaacggagagtatgtccaatttcaaacttaaattcgatgaattgtttaggaaccttgataagatattgaaatcattaagtaattttatgaaagagagagagtttgttcaattagactataacttctatagttctgaattcaagaagttgcaaaatggaaataacaatttaaagaagaaaattgatgtagagaacaaattaaatgaatcgataaagaaatgtaagtatcttgatgatatgcttgatgtagatttaccaaattttttaaatttaaacaatgcattggttaagtctatttcaacattattgttctttaacagtttggaaatatttggacttattaacagacatttctccattttacagaatctcatcctgatatagtgttcaataacttatattttgataatgaatcaagaaaagtgatgaatattcataaagatttgaataatagaatagagtcacttgaaataatgagttattcaactcagcagcaataacctttataatatgaatagcagttcaaataccaatatcaataaaaatgttaatgttcaacatgaaaagactggaacggcattgtatacttacaaatctgataatttaggtgatttatcattcaaaaagggtgatattgttcatgtagttaaagaagacccttcagggtggtggacaggattcatgactgttaatggcagcattcaaacaggtaaattcccttacaattacttcactttctaaggaaaagcattcaacattacagttagctatataaattttgactatttatacagttccgagttataaatttcttttctttcaacttcctttatcttcttttcatcttttaacttgttaactctccctatctagtcgacaatgtttcgtattggtgtcactactgctcgtttaggtggtgtctccgtttggagatccatggtgaaacctgctaatttaacaagaccttcattatcaacatcaaaagcatttttttcacaatggcaaaagtcaactgcatgataatactatcaagaattcattcatgaaatctacaatcacaaacaagttgaaaaccttttgtctttaagagattagctacatttcgtgatcttggaagaaatagaggaaatagtggttatcaacatccaaattataataatactgaaaataatattattaaaccatttatatttgttacattatttacaattgtaacatattttgccactccatatattttcaaatatactccaatgtcatattttaataaacatccacaacatttaatatggactattttaggtttaaatgcaattcgttttcggtttatggcaaattcgttattcaaatactttactttacaagacattagagaattattttattatggatagatcagcattaacacgtaaatctaatttatcaatgatcttctcatcattttcacatcaagaacctttccatcttttagttaatatgggttgtctatattcattctcaggtacaatgatttcaattcttggaattagtggatttacaagtttatatttaatttcaggtgtttgggcatcatttttttcacttgcatattcccaaattttccgttattttggtagatcattaggtgcatcaggttcaattgcaggtgttttcacagcttttgcaacttttgtaccaaatgcaggtatttcattctttttcataccagttccaggtggtgcagcagttgcagctggtttatttgcattatataatgttgcaggttgtttacttagatggggtagttttgattatgctgcacatttaggtggtatgtgggttggtttcctgtgggctatgttcctgaaatggaaagctgaacgtcaagagaaggaaagaagagataagctacgtaaatacggttggtgagtaattccgtggggttttttctttattataatcttttcatcatctgttcttatttatctttatctgtttataaaattgcttgtatataaccgtatagaacagtattatgccatatacacatcattcacattcaggtagttattgtaaacatgcacatgataccttagattctgttgtaaatactgcaattaagaaaaatttcaaaatattttgtttaactgaacatgttccaagattagatgatgcatacatttatccagaggagaaagagcttgatatgacccctaattcattaatggttcaatttaatgaatatgttaaacacgcaagacaattacaggaaaaagttaataatgatagtaatatcaatacaaaaatacttgttggatttgaaagtgaaggtggtataaatgatgaacatttagatatgtgtttgaaattaagaaaagatatcaatgcagaagtcattgttggaagtgttcatcatgttaatggtattgatattgactttgatcaagaaacttggaatattgcatttaataaatataatggtttacaaggattatataaagaatattttacattagttaaaaatatgattaacaaattaaaacctgaaattgttgcacattttgaccttataagattatttgccaatattgaaatcattgatgacgaaacaaataaaaaaactaaaatatcaagagaacaacgattaaatataaatattgaaaatgattggcctgaagtttgggaattaattaatgaatcaattgatgtaattattgaatatgacttagctgtggaattaaatagttcttctataagaaaaggttgggatactccatatccaaaggatgatattatgaaattaatgatttctaaaaatgtaaaattcgtattaagtgatgattctcatggtgatgatcaagttggtttaaattatcaatttgtcatgaactatcttatcaaattaggtgtgaaggatgtattttattatgatattaacgatggtaaagttgttaaaaaatctgtttctttaaatgaactattgaatgatcctttctggaagattaactatcctgattatactttttaaactaatatataatataacgagcgttacgacgtattatacttaggattaatcctcctcggcgtgtagacaaccatttaccgttggaaaatgtagaatccctacttataattatattttataatcttacgtaataatttaagtcaattttctcttgaaaaagagctttttttcaccaaaaatcacgacactctttttgttgtgggctcaacaccgtttttacataagtaatttagctgaaattgtgtggcaatatctggattcccacagagcagctacaaacaaaccagtggtaccattggaaagagaaaaaaagttattgtggtcctacagagagacatttcaagatttgattcccaattttctaaaaatcaaaaaaaaggtgcccaaaaataggaccaaaaatatcactaacttcatcaagcttttttcaaatattgcactatttgtaaacaatataacggtaaagtttccggtacaaccaagagaggatatttcaatgagccatgtccgaagtgctcaatgttgatgaccatcttacaggactttgttaaaaaactgaaatttcaaactaaaaacgttcataactccatcaatagtttttgaaatcgcggctacaaatgtgatatttatgaggtaattggtgagggggaaaccgaagacttaggcacgtcatcagatgtaaaattaaatccgcgtaattccgttattgcgataagatatacagtctttttgtattatgtaaaagtcggatgtatctcagttaagtccgctataactttaattccaaccacccctaaaaattttgactccccagtaattttattaggcgagggcaagggttactggggattaaaaaattattgccggtggctaaaaatgaagtcactcagtataaatactatttaataagcttacaattctcctttgaaattaataaccttaattattattcttcttttctcttttttctttcttctttaatcaataagcgattacaaattattaataataaaatgtctacttgatttagagcaattggtgttattgattacaaggattggttaaatccaaaagaattctcatacgaaccacaagaattacgtgataatgatgttgaacttaagattgaagcatgtggtatctgtggttcagatattcatgcagctaatggtgattggggtgaaccttatgctccaatagctgttggtcatgaaattgttggtaaagttactgcaagaggcccaaatgcaaaattccaaattggtgacagagttggtattggtgctcaatgtgattcatgtcattcatgtaaacgttgtggaaacggtaatcaaaataattgtaaacaaatggttggtacatatggtggtacatatagagaaactggtaaacattcacaaggtggttatgcatctcatgttcgtgttaattctgaatttgcatttaaaattcctgaatcaatggattcaaattatgttgcaccattattatgtggtggtattacagcatttagaccaatgatgacttatggtgttaaaaaaggtactaaagttggtattaatggtattggtggtattggtcatatggcaattttatttgctaaggcattaggtgcagaagttactgcaatttcacgtaatgataaaaagaaagaattagcattatcattaggtgcagatcattttatctcaactgatgaagaagaatttgcaactaaatatgaagattcacttgatttattaattaatactgcatcatcatttagtgaaactgctgttgattcagttttaagtttacttgcaccatatggtcaaatgattttcattactgcacctccaatgactgataaattaactctttctccatttcaaatgttacgtagtaatatttcagttggtggttcagttattggttcaccaaaagatattgaatatatgttagaagttgctgcaaagaatgacattaaaccaatgattgaaactttagatattgatgaagcaaatgttaaaactgcttgggaaagaatgactaagggtgatgttaaatttagatttgtcttgactggttatgacaaatatttcggtaattaatcaaagaggttagtttttaaacttatacagttcagtttttttgatgttttatcctatacttatctctatccctctgtttataatatcccttagcttataatgtttttaagcgatttcaaaatcctaagtttatggttttcccctcatcaaataatctcataaatatcacatttgtagcctcgctcttcctctattcaggcttaactacagttgatcggacggggaacggtgctttctgctcttttttttttacattcattttattttcatacagattgattacttatatatacgcatatattattcatgcttcatcaattcaatatatcttcatatactgaactaaatgtaatttatttttaatagtttattctttaacctttttcatctaatttatatctaataagaactaaatttttaaaatttgaataacaaatatgtattttttatgaatcgttttgtgattctaaattcagtattattttttttgcttttatagcattgtttgttgaagaatataattaatttgattattatatttaccatataagcatctccttttgataaaactgaaccaacaatattgattagatcaatttctatttataactcttttaaaattctttctatgcctttacaattgaaaaagatatgatgagttccaccttcacctttacagaattggcaagggtgataaaaatgagagtttaacatccatgtttgtgattcaaacaattcattatagtcaacatgattttgatttgtgattctacccaaccaaccaaaagaagcttcaaatccaattggttttctattttattaacccaataatctgaattaaatttatccttaaatttctctttgtaaaatctttttgaaaaatgtttaaatgattcaatattggagtacaccattactagtgctaatgtttttaaagaagcttcatccatgttgtaattcacgaagtgttcaataataaagttgatatctgatcacgtgaccacgattgcaacaataacagaagctaagccaccaataatttataaacaacaattggagggatggccgagtggtctaaggcggcagacttaagatctgttgggcgattgtccgcgcgagttcgaacctcgcttccttcatagctttttttatttttacaaattacatgataaaatacttttaaaagcatttctttaagtttcttcatctttttggcaactttatcttttttttatttcatttgataaactaacaagaaaaatggattatcaaaatagagttggatctaaaaaaggttcaggtggaattgccggaactgcagaaaccaatcaatatagaagagaaagacttaaaacacttttacaatcaaagattaatattgatagtgatccatatgttttcaagaatcatttaggtgtacttgaatgtaaactatgtttaacaacacatatgtctgagagtaattatattactcatacgacaggacgaagacatcaattaaatttaatgcgtcgtgctgaaattgagaaaagacagaatggtttaacgtccgattcaaatattgataaaaatattaagaaaaggtattggaaaagtattggtaaaccacaatataaggcaatcaagatcagagatgaagaaactttaaagaaaggtttactttttgttctaaaactcgataaaattaagagtgatgtcactcctgcatataaatttgtatcaaataaagaattcagtggtggtaaggataatgatacatcatttcaataccttgtgataagtgctgaaccttatgaaaatattgcatttaaaatacccaatactagtagtataatatcaaataagacatgggattactgggatgttgatactaaagaatattgtttacagtttttctattcaagttagttaattatacattatattatgacatctaagtttacacaacgaattcagttaagttttttctctcatctctgacatattcaacaagtcttttgtactgtcaatcttatttttaagttcaccaatatacatttgaattttagaattcaatttttcaaattcaaaatttgcatctttacattcaaattcatattgtttttggatatcggatatcttattcatccaatcattgatctgtgcttcctttttggttaattctatatcatcaacatttttttgagatttaacatcattgaattcaattgcttgatttgttaatttttcatcaagagatttcattttttcactatagaatacttttaatttagcaattctatcttcattatgttttaattgtctctctaattgtgatatctttctattataatcattcgcttgttcctttgtttgatcgatttgacttttcaatgatcttaaattctcatcatatgatttattccttattgcttcacttttcaaatcttgtaaagttttttgtaaattagataaatcttgtattaatatctgaaatgattccaatgaaatattcatatctcttagagattgttctaattttctcaaaacatttgtctccttagcttcagaatctttcattttttggattaactcttttacactttcaggtgattctttaatataaggtcttatttgctctaaatctttttcagtttctatgtataatgcactttgattctctaattcatttatcaaccccgttttttcacttttatatttctcatgatcatctgttagttgtttctgtataatccttaaatttcttaactcattctctaaatcttcattatttttatgaagttcatcaagtgtaaaattttgattatttaatgcaatattgatcttttcaatttgactctctaattcatgatttttcttaatcaatgatttataattttctaatgttttatcattattatccatcaattcatctaaatcacccattctttcctctctaaatctagcataattaatcaaagcgcttagtattattctaagtctcgtatgttcaggtttggcaacatcccgtatactaaaatcatcaattccacaatcacataaaaatttatacataattctttgacttgcaacaacattaattgaaggtcgtatatcataatacttatcactttcatttaacatatcatcagtattattatcattattattattactttcaatttccatattggatattttttctcttaatgaataaggtgaaatatataaaaatttgtctataatttgttcaatcaatgatttcataaatgaagaagatggacgcatcagcattgattcatcaatatcaaatcccattgtatcatacagcattacaagttcttgtggatcaaggatggggaatttatattttactctgttcagttgggcctgttgttgagatgacctgtatattgcactgggacgagccattcttgcttcagtggtgctttagacctatgttattgtaagtttaagacttttcaagaaagaaagaagaagatgtaaacaaaggaaaagaacatgaaatgaagatctccgcgtaacatgaaactttgttaaagcaggtttttcttctttcttctttcttttttcttttgctaaaagtaagcagggttcatctggatgattaacatatagaaatggtaaaccaagagagtaatgtggaaacatctggaaatatggtgatatcagattcatcacaggaatcagtgatggaatcacaataccaatcacaaatggagtcacaataccaatcacaaatagattcacaagtagaatcacacgtagaatcacaagtggaatcgaatggaaagaagaaaccaagtataccaccattatatggagtatatctacttaattcagtaacgaaaaagagttgcttttatgttggatcaacacctgatccatgtagaagattaagacaacataatggagaactttcacgtggtggagcttatagaactaaaaagaaaggttatagaccatggaggatgatattatacgtttatggatttcccagtaagataagtgcattacaatttgaacatgcatggcaacatgcatatcaaacgcgtcatataccatttgatagaagattaaatcctggtaagaaacatactggtagtggtactagtattcatagtaaagttgctaattgtaaattattactgaattctgaaagttttaaaaggttaggactaaaggtagcattgtttaatcaaaatatttatgaaatttggttgaagaatagatacgcagttttcacaccaatttatttagaacttaatgttaaaataaatactgaggacttagataatgaatcagttattaaaggtggtaattataatcaactgaaggagtttatggaatctaatgataaacataataatgagtatttggataagtgttggggattatataatgataatttcaaaagatattgtgagtgtttaatctgtgaacaggatattgaagtaaatgattcagagtatactttgagtgtttgtaccacaaaagattgtgaatctatttatcatttaaagtgtttatctgatgaatttctcaaacaagaagcagaattagataaagaatcttcaataacaactacacacatactaccacataaaggtaaatgtaaaggatgcgataaagttaacttttggaatatgatagtacgaggagcaacacatttacaggagagactaaatgattaaaaatgattttatagacatgtataaatttgtataatttattaatattaacgttttttagcttctgtaacattaattttggaatcttttgaacctttcttctctttaatgacttcaactttttcagtttcaactttcttcgtagttccaacataagcagttttctcaggttcaaaataagaatttatcatagctttaatagttgcaatgactaatgaccaaaatccaacaacagagacaaaagtaccaataataattgatgagaagaaaactgcttcgcctggtctttgaattaaagtttcatttggtgctgcaaagacatcaagtacataatcagttaaatctgataaaaatttagctataacatccaaagcatattcgtagatatcattaactaatggagtagttaaatatttagaatcaaatgtatttggtttttcaacattaggatctaatgcaattgcctctgaatgttctgcacttaattttggtaagaaagttgaattaccaatatcttcagcttcttcaattgaatgacctaaataaatattattaaacataatatcagcattaattgtccaaatttcaaaacctattgcaccaattttttctaaatcagataattttttggaaggtgtataataatttggattaggaattaaacttggtttccattcacctttataatttggattatcaatcattcttggtttccatttacctttataatttggatttttaatttttggtatataccatttaccacaaccatgattttcacaatttggattatcaattaatttttgttcccaaataccatcatattgatcatcccaatcttcaggttttaaatcatttggatcaggaatttgttcaggttcattttcatcccaatcttcaggttttatagctgatggatcattaattaaatacggagcattttcatcccaatcaattggtttttcatcattttcatcaataatatatttttcttcaacccaatcttcaggtttaatttcattttcattgatgatttcctttggtggtaataaatcaaaatcatcattatttaataaattaccagatcttacaatatcaccattaattctaatttggaaatcttcattttgatcaattataagtgtataaagagttgtagtttgaactaatctagccattggaggtattttaacttgatgttcctcaatttcaccagttttttcatttaaatgttttataataaaatgaactttattatcattaccacatttatcaggtccaaacatgataacatcaggagatttatcagaaaattgttcattaataaaatcattattatcattacttgttaataatttaatataagcaccaccacattctaaaggtttttggaatttaacttcatattgtaaaactaatgtattatttgtattatcgaaaatttttggtaatttataactaattgcatgcaatgctgcatcagttttagcaattaaacctttatcacctttaataccatttaatatataagcttcatcaacatcccattgaccaatataagctaattgatcatctttttcaagatttgaagtaatccatcttttatcccaattattatcattaaattgttcaaaaattgaatctgatgataattttttatcataaggtttataaatattatcatttgcattaactgatagggttaatacagatagaattgaccatattgtcgtatatgagaacttcattgtcgattgtgggcaaattataaaagaatatagtgaaatgacaagggtaaaaagagacataaattgaatatcattggtagtactatagcctacttatgccgagtaaaaaatatcaactccgtggggtctgcgatatttatatgcatgtcgtttcttaaattatataggtagcaatttaaggtatttaattgtataaatatagcaattgttgtagatataaagcaagtctataatatgtatgtaaaagagagaatgaagaataatagagtaaagaatagagaatatagtataaaggaagaataaaattaattagaatataatgatgaataaacatcattaattgcattaccaaaagattctgctcccttaatcatattatcttcttcagaatatgaataagttgcacggaaaccagcttgaattaatgatttatcatgcataaaccaatgacctttacttaatataactttatatttttcacttgcaattttataaatttgatcttcaataaatgtagcccattcactatcagaataattagaatttggtaattttgggaattcatttaatttaatattaatccatataaacataccatgaattggtctattataagtaacaagtttatgtggtaaatatttatcaaaagcttcaagcataatatttcttcttcttctataaattgattgtaaatgatcaagccatttaaggtaaccatcatggccccaatctttaaatatcatttgtaaaattaattgagatgatgcacttgctgaatgaattgataattcattatgatttgcaagtttatccctaaataatttattacaagtaacaattgaaactcttaaacctggcattaacatttttgaaaatgaatcaattctaatgactctaccttctgtatcaaattttaataatgaaggaatatgctttgaattatcatcatcaatttgtaaatgataatatggatcatcttcaataattaaaatattatgagtattacaaatttctaataatttttcccttctttcacttgataatgtaataccagttggattatgacctgttggcattgtatataataattttgggaatttaaattttttagtattttcattattataccaatttgttaataattgatttaaatcatctggtaaaataccattttcatccattttaattgaaaataaattaattttaaaaggaatacaagtttcaaggaaacaagaataagttaaagattcacataaaattgtatcctcaattggattaattaacattctaaataatgcatctaaagattgagttgcacctgattgaattataaaatcccaattttgataacaaggtttaaaattatcaattatataatttttaacccattcattaaaatattttaaaccatttgaatccatatattgacaagatgaaataatttcatcaggattatcaattatatttcttttaatttcatttgatttttgaaatgaagattcaggtgattcaacattaattgttataccctttaatgggaaacattcaggatttggtaaacctgttgataaagaaattgtaccaggagctggatgtgccattactgaagcttttcttaaatttgcttcattactgaaaaatgttgaaaaatcttttgtcataatgtataaagttatttgtttatatcgttttgtcgatgaataataaataaattacaagaaaagaatagacggaacaggtatatgaataatataaagagcaaatcctttgccttttataaactagaaatcaaagattggtagggctaaagataagaaaagagcataatatcgctaatatgtcgccaataacctaaataggaatgaccaataatcaaataattaattaaatccatttgcccttccaataatttgaccacttaccactaggaaaaacactatcaacattcaaacttttatgtcatctaacggcaagtacaggcccctactaccttttagtggattaaatagtggggaattttatcttatcattacgtacattacgtaatacagtcgcgtctctctgcatttcttatcttcttagtatgtaatttacacagtgaataaccttatcattgtgtaaatgagggtaacgattctttatctatttgttcatttcccaaagaggtaataaacaaagacgatcgaccagacacaaacgacgcatcgacccaccaaacccctatctatgtggcattataccctctccattgcataaggttatatcactaacatccattcagtaagaacatgtcctctgtggcatatatacaatcattaatagtagattgagttgtaattactatcttatactgtaatattgtaatagtaaggaagtaatccttattgtaaataatatgtagagagactgtaagcagataattccctattatacatggctctggtgttagacttgttaactctctaggtatgacttacgtaataatatctaataataaggtctacttaaaggacgatttctctatatctatataagaatctatataagaagaactacataactattagttattcccacatattatatcctgtgggaatttgccctcttatacatatctcatgtaacgagttgccccgttacctatattatgatattattactatcaatatatcatttacttacgtaatatatcttacgtaattatattctatatttatatcattctgttgagatatatgattataagattaagtaatcataaacatttcgtcgaagatttcgtcgacaacaattaaaattattcaacgttgaaatacgtttcgtatttcaagtatataacttatttacttttgttcttcttaggagaacatccgggcttatatattatttatatattaaaacgcttattattattacaattaaactttatctagttattattattaaagatgtctaattactctaaaatggaagttgatacaacatttgagatgttaactcaaatgcttacctctggtgaaattaattcaagtgacattaaaggtgaccctgaggtcttaaaacataaattggaatccaaattcaaggaaagaggttttgactattcgtctgattcttatgtaatccagtcaagaaacgatataaccactctcgcttccgaatatggcgaccagagtgaggagctgatcaaactggcttctcacaagatgataaagaacaaagctactcgtgatattgatcttaccaagtacgaatttgtcgattcggagtcctcttgtaaattacacagagaagatccatgtatgtgcagaattccaaaagaaatcaatgattcaattcctttcattacaacattgaatcaaccatcggaattcggtaactggatgagggaaatcaataggttattaggtggtgttaaattcactgaaatcgttgttcaagcatttaaattagttggtaacaagttcaccgatcttcaacaataccacggttgtagaacttttgatggtactatcattagtgtcattgtcaaaaccgtatccaagcaaatcgctaatcatgttgaagctaagattaaaactaatcgtaacagtgtccatgttatcgcaagaattttagaaaaattgaagattccggtcgataataccatgatgcatttcaaattaaatgaaatcaatgctaacgattgtgatatcgttaggattaaacaaactattgaatcaatccttgttggtttagaaatttctcatattccatttaatgaaaaagttgcgtgtgaaattatcatcgattctggcaagctacctcaacattttattaccacatggagatcaaataaggaagatcaaaccttatctcacctttaccattcgattgaacaattgattgtcgatattaacagggttgagaaaactaaaggtttaaaacaactcaataatatcaatcaccataatgaaaatgatgacaaacatggaaattatgttagatctaagtactgcagatattgcagacttaaatcccacaacacaagagattgcagaagacttaaggctaaaaatgaagcaaaaggtgaatcaaatgaaacacctgcagcgaaacctgttgcaactcttgaatcaaataacaacaaaaatgaatcttcaaataaagaagaaccaggtaaaccagcaagaaaaggcagatttatcggttctatcaacctcaccaaattggccaaaagcttaaataatatagaccgtaacgaaaacattaaatcaagaaatagagttatcattgatactggtgctgaaacatctgcattttgcaatacaaatttgttcaccacattagaaagatatgaaatcccagagattttagttgcggcaaatggcacacctattcatgtgtttggtgaaggtactttcgagctagaaattgaagacaagatttatacaattgatgcagttttcacaccattaattgacgcaaatttactaagtttagatcaaattgatgaacttggcttaaccgctaaaacattcccaaaggaaaagatgatatacattggtcatgaaaataatattaaaaagggtatcaaatttgtcaaggatggttctttatggttctataaaaacggtgtattagatgataactgcgataaatcatcatatctcaatgacgcgagcaatcgtatcaaccaaatatcatattaataatgttaattcatctaatattactgtatctgaaattttatcaagaggtgaatcaaatttagataatcccgagttggaacaaccaacaacagatactgatggaaagaattggcataaaattttaggacattctggacctgcaatagttaaatcatatggaaaacatggtgacaaaaattgtcaatgtatggattgtatgcaagcaaatttacaaagtcacaaagcttataaaggaagtacagaaaaatataaaattgaaatacctttttacaaagtacatgcagatttatgtattattcaaaatggaaaaggtaaatcttatgggaataccactagaaatttattagttatgttagatgattttacaaattatattcacatagatttccctatgaagaagaatgaaacaggtaaaaagattgctcacttcatagcctttgtacaacaattttttgaacaaaaattgaaattattatctacagataaaggaaaagaattcaccggtggtgatacattagaaattttattacaaaacggtaccagattatgtacaacctcaggttactcatcaaaaagcaatgggaaagttgaaaaattaaatcaagatatattaagaaaagttcgtccaatgttgatatcatcaaaactcacattagatttctgggaatatgcatgtatgcatgcagttgaaattatgaataggagaccattcgaacatttagatcaaaaatcaccattgtattacttaatggaaacaatcggtgctgaaaatgaagtaattgatattccaccatatgaattcggtgatcttgttatggtaaaaattccagctattggaaaattaggtgatagaagtattcaaggtgcttatcttggaattagcagatcagtattaggaggttattcagtttgggttccaactaaattagatgatattcagaatgctgaatatttaaaaggttttggacgtattatcgatacgaaagacgttcaatttttagataataatatgaaatttatggattggttatttagcaagattgagcataaaccatttacagattattctaattttgatatcgaatctacaggtttatttaatgaagaaaataatgatgataattatgaagaagttgataatcaacttaaagagctgaataacaaagtcgaagaaacatcaaataaaaccaataacaaatcaaatgaacaaccaaacattattattcacaaccacatacattctaacgatcctcaaaagtcaaacataaatacatcaaatgtccatcacacatatcaatcaataccagatatcgattaccataatgacaatgttttaccaaaacaatttaattctgcttataatttaggtggtgcatttatgaataatgcaaacttaggtggtgcaaacttaggtggtgcaaacttaggtggtgcaaacttaggtggtgataatgaaattaatcaaaatacaagttccattaatttaggtggtgatatacttaatgatttagatattaataataatattaatagaacagaaaaatcattctttgaaagtactgaatcatcaattgaaatattagcaaataatattaataatattgaatcaaaaattgaagatatcaagttaaaggtaaatgatatggaactcgatgaagtatctaataatacaaaagagttacaagaattaagaggtgaattagttaatttagcaaaagaatataagtattccttaaaacaatttgatgaaaaatataataaatataataatgaattatacaataaaattggtgaaaatcaaaataaaatattagagcaactcaataatacagatcgtaatgatgataatgatataataaatcaaatcaataatgaaattgaaaagaataaccttgaaatcattaataaattaaaagaatccatggatttcaataaaaatattcaaaattcaatagatttacaaaatcaaaatatatatattcaaatgaaagaacaaaatgcaaaatttaatgaaaaattagatgctttagatacattaaaagaaaatataaatgaattagctaataaaattaataatattactgacaataaatccagtaatacagaaaataataatgaagttgcaagcatcaacaattctataatagatttaaccatgaatgacaacacgatcatatcatcaaatgagaaaaataaacaatctgaagttgagaacgcattaaatgaaatattaggatttgattatgaaaacaaagaaaataaactagttgtaagacaacaagataactttgatgatcaattagcatatgtacaagatgatgaccatcagtatgataattataaaatggatgaaaccgaacttattaaacaactagatgaaataatggaagtaaatcaaaataaccagatggttttatattcagaaaatgataaatcaactcctttagaaaagaaagaattcaaagttgttaaaccttacaatttaagatcaaataataaaataaaatccaaaaataatcctaatgtcaaatataaaaattatagagatcttatcaaagaccaacatatctatcacattagtttagacggtttaaaatcattacaagataattatgttaaaaatatacaaactaaagatctggtatttatcattgatatcaacattgaaaatgataaattgttcaaaaatgtctatcacattaacaacattagtattaataaagctttaaaatctaatgacaatcaaaaatggattgatgctatgaagaaagagtataataatttaatatcacacgatacttgggaattagaaccaactgaaattattgcatatgatgaaagaagaaaaattgtgaaaacaatgtgggtattaaccatcaaaagggatttaacatataaagctagactagttgcaagaggtgatactcaaccagatgatacttacaatgaaacatatgcttctacattatcttacgaatcattaagaattattttatctgaatgcatacaattaggatttgaaattgaaatgatggatatttccaatgcttatgttaatgctgatatcgatacaactatttacattcaattaccaccagatacaccatttattaatgttaagaattatgatggccataaaatgtatgggcataagttattaaaatctctatacggattaaaacaatcaggaagaaactggcaattattattggaaaagaaacttaaatcatttggtttcgaaaaatggtcagatgtagattgtatcatgagaaaaaggaatgctgaaggaatgaccactgcaattgttggttattttgtggatgatttaatcattggtggaaatagaaaagaagtgaataaaataatgaatgatataaaatcaaattttaaatgtactactactgaaatcgatgatgaagggtatagaaatatcttgggtatagacatcaaaattaatgatggctacattgaattaaaccaaaccaagtatattgatgcattgtctgaaaggtttaatatcaaacctaaagaatatgtaactccacttcatgaaggtttttattttaatcctttcaataaagatttagaattaggaatttcagaattgaacaataggatcaaatggatgagacaagccattggtgccttactattcgttgcaggtgcaactagaccagatatacaatatgcagttaactacttggcaagattcgttctcacccctcatgatgaaattataaacgaaacggagagaattataaaatatttattaagcacaaaatatttgaagatattttattacaaagattcagataaaagtttggtaggttacagtgatgcagatcattctggagacaaaagtgattttatttcagtaaaaggttcaattttcatttacggtgatgggccaatttcatggagaagtaaaaagggcagagtgtgccaaagttctactgattcagaaataaatgcattcatccaaacttgtaacatggcggtaaaattaagaagaattttaaaatttatctatggttatgaacatgaagagaacgatttagaaccaacattcttatactgtgacaataacagtgcactaagaatggttgttacaggtaacgtatccaacgccacaaactatctcacacaagatgcatatattgcatatcaatattttgaaaacggtgttattgatccaaagaaaattgagacaaaattcaatttagctgacatcttaacaaaaccagttaagggtccaacaatgaaattcatcagggacatgatcctccaataatttattttactattatcaattatgaaacttcaaccacgactacatgtatatgatgaggtggtgtgttgagatatatgattataagattaagtaatcataaacatttcgtcgaagatttcgtcgacaacaattaaaattattcaacgttgaaatacgtttcgtatttcaagtatataacttatttacttttgttcttcttaggagaacatccgggcttatatattatttatatattaaaacgcttattattattacaattaaactttatctagttattattattaaagatgtctaattactctaaaatggaagttgatacaacatttgagatgttaactcaaatgcttacctctggtgaaattaattcaagtgacattaaaggtgaccctgaggtcttaaaacataaattggaatccaaattcaaggaaagaggttttgactattcgtctgattcttatgtaatccagtcaagaaacgatataaccactctcgcttccgaatacattcctgacatctcggggggttggaaaaatgtcagtaaatttcaatttgcttagcatttgaatttctttcaatttatatttatattttagcaataagatattttataatttgattaatctcatattggattaaatatttttatacttatatttgtttataattcattcaatcagcattttaatcacatattggattaattattttatgattgattaatcacatattggattatttatattggttaatcacatattggattatttatattgtttaatcacatattggattatttctattcagactcagtatattctaagcaaaatgtgttgtttatggatggatgttctaataattcatgaagtttagtgaatccaaccgttttggttagcatatctgctggattgattgcacctggtatatgttctatatcaaataaacccattttataataatttcttaacttgtggtatgtatttagtaataatttttccttgaaatcaggtcttctatgttgttctttaattgtttcgactactggcaaattgtcacaatatatagtaactattatattattatacccaaaatcatctagtgtggttttaatatcacatgcagcttcaacagcctctctaactgctaaaatttctgcttgaaaactgcagtctgcatgttgtactatcctataactttttgatttaatatatctctggtttaatactatgtaatatcccccttggcttgtatgaggtaagtgagatgcatctgtatacacgtcaagttttattggatcatcaattctaccatctgtatttcttattagttctttatcctccctaatatatctataagatgatgttcttgttgtatacacatattttaaaacttgtagtgcttgataaaattgcatgattgtaggaaaactactatattgagctaacatatttgcatgaacttgaatatcaaacctacccttttgtgatatatatattaaaatacccactaatttttgatacattcttaaactaaataattcatgcgggaagtgtggatgttgttcgtaaaatgattcataatttgtcgaattatgtttttctaatactagttgttcaagttttttatatttttctttatcgtttttaatccctttgatttctttaagttttttcattaattctagttttaatttaacacttttttcattaggtgatataagtgattcaatatcgatatcatctatatctaactttggatattccatttccatattcacattttcatcatctcttctattacctatttcataaagatttttcaaaatatttttttctgcttgtggtatctcaccatcaataagatcaatgtttcctgtttttctagttggaagctttataaatgttatcatttcttctggtaaatcattaattgctttttcaatatatgtgtgcatacttaaaattaacatattattaacctttgcaatatcataacctaaataatattcagggtctcttgttatttttaatgcaaagttgtctaataataatttttctaatttttttgcacaatgtgatagtaacattatatcatcaacatgttccacaataaatgttttataatcaatcgacctatgtagacattcatcggttataacatcttttactattgagtgtagtacgcttactaatttgtcatggaatgcctttggtgatgtatttaacccatatgcatgtttttctaatttaactaactttgttgtaaaataatcttcaaatccttgtggtctatctaaaaaataataatgttttggatcaatttctgcgtgtaaaaaagctgttgatatatcatatgttgtaatatctgttgttttatcaattgcatattgactaaacattaaaaaacatgactcttgtcttgccaccggactacttgcctctttatttttctttccaacccaatctctatgaattgttatcaatctggattttggtgtcattaatggaggttttaacgagaataaccaaaaggtatgcatttttaaactatgcttaggaagcttttttctttcattaattttactaaacacattcaattttatgaaacctgccatttctttttccacagatggtttccataatggatcattttttgctgcatagacatttgatggtattttaatatctttctttattgctgtaattttttgatagaataattgtggaacaaatatcaattcctcatttgcttgtctaattgatttatttctatgtaactcaaaactttttaatactctatagctagtgattaactgtgttttatgttttttgttatttatcttcaatttataatccatatcatatcctataaaatacccttcttctgcttttgaattatcatcaggagtcgtgtaaaacacaacatcttctaagaatagcggcaattcaggtaatgcatatcctgttccgaaaaacaatcttgctggttgtgattctagatattgctctcttttatatggttcattattttttctttcaaaatatctgcctgctggttggtcatatttaatactagaatgtggcaaatgattatatatcattgttgcatattggaaggattctctaataaaacgtttctccgattctgggtttaaatgtgccgtaatcaatttttgtaaagtttttaaagtttgtaccgctctttcagcagtgccattccattgtttattaccagtaggagccaaatccagatgtggttcaattagtacttccattgatttgtttccatatatgtttgttgtataagctaatttataaaattctgagcctttatctgttgttattctttctggttgtcttttatatgttgtatgttgttcttgaagccacttatttaatatatctttgatatcatgtttatttgatgttgttgctgaatacatgaatttgctatattgatccacaacaattaccacataccatttgtgttttcctctgataaatggtccagcagtatccacatgaatttgttgaaaaacttcatcaatgtttctctcttttcttcctgttgtaggtttcattttatgttttgttgcaatacacgtaagacaattttttacttgaaactgatcttccttttttatagggatttttaattcttttaaattttataagctgatatgtccaaaagcacaatgtagtcttaaaattggactagctggagccgttttcatttccaatttcaaaagttttgtatcaaccatcattaagttcacagcttttttttgtgtagtatttcctataaacaccattttttgttgatttttgtttatttgtttttccatctttaatttgtacaatccatttttttcttctatttcaataatataatctttccaatcttttgataattttttaagccattttttcacttcacctgaatattctattctaggttttaacaacaaaaactttccttttgtaataattgctgtgtatccaatattcgtaagctgtgatacacttaatatatttggtgcatctccttttaattccaaacagtctatttgttcattttcgattaacaagtttcctcttgtagttagcaatttttgttttgttccatctgctaattttatttcattgattgatcttttatttttttcattcttagctaattttgttgttgatatattactaccagtatctaaaatgtattctaaaacattttcatttttcgatatagctttattattaattgcaatattattttctaagttatataaagctatatctcttaattgctatttatgatttaatgatttagaattgctagcagtacctttgatattccaattctttgatttatttaattctttctctcttaatgaatctaaagctttcatcctgccaaaaaaaggtttcatattctgccaaataactctttctttgtcaaacatatgactattatcaggatgttcacaataatctaaattctttgtacaaatgaatgcaccttgtggtaattttgggtataaatctgtaccatctcttggtaaccattcataattttcgattgcttttttataattttcgactgcttttttataagatgatgtattttctgttacttgtttttccttattacttttttcaatgaatcttcttttcttaaaatcttctgatttgccatcataaaaattttcattttcttcgacatctataattttcttcattaaatcatctttcatttgaagttttgctatttctcccataacttttatcatgcttatttcagtatcattttttaatgcttcattcaattcttttgtaactatttttttaatatttgctatttggttctcatgaaaaaaaggcataatttcttcatatatagatgctgctgtttggatcaattgctcttttctggtagcattaatatatttgttccatctattagtcacccaatcttgaacgtctttaaataaccaaacttctccttctaactttctttttttaatatttttaaatctcaaagaatcaattatatcaaataattgactatcggaatcaaataattcattagattttgcatgtttgataacgtataatttatgaagtactccaacatgtgagtattccatttccatatcgctatcccataaatcagtaactcttttaacaatctcactattttttcctccgtccaatgtgttaactactgattcatacctatcatgaatttgaaattttgataacacttcacttaacttatattcagctaacttgatcatattaaatttgacatttttttttgtaatttctttatcgaaatcatcaacaattttcattttttcaattttataacctttactgtataagttttgtatatccttgttttttagaattttaccaataataattcctcctgttgaatcatatggtgtattatcaagaataaatttctcgactcgtttgtaccatgattctactgtttcagatttatttggatttttatcatcagttaactccttgatagaatcgaatatttttcctttccaggattccaataaatctttgaataccttctcctctgaattattacttgtcatatttagaactgcttttaacctgttagacttgttaactctctaggtatgacttacgtaataatatctaataataaggtctacttaaaggacgatttctctatatctatataagaatctatataagaagaactacataactattagttattcccacatattatatcctgtgggaatttgccctcttatacatatctcatgtaacgagttgccccgttacctatattatgatattattactatcaatatatcatttacttacgtaatatattttacgtaattatattctatatttatatcattcctgacatctggtgatgcatgatagcgtaatatacaaacaataaaagtgatgattagttttttgactaattaaactgatgatctttcttttttatcttttatccagatcttcttctttatctttatctttatctgtatctttatctttatctttccaatccccacattaactacaatctcaattaaagtactcaatgtccgaccttttctataaaaattcatttgatccctcatctgatcctttggatccttctgctaaattaaattctccacatcctttatctgattcatctgctcctcctcctcctccaccagcaccaactaaaacttcaacttctgatgctccaactcctggtttctctcttttcagttctaaatataccaattcaaatgattctcatcatatagataataataataataataataataataatgataatttatcaaatttaaatccacattttaatttgaaatttaatgcaaatagaaggacaagtgtttcagctgaagctttaaatccaaatacttttggtaatgataattggaaacctcctgttcatcaattatctcatgaaaaattaactcgtcttaatgaaagtgtaatgaaaaatttcttatttaatcaattagatgatgattctttacgtacaattttatttgcattagaagaaaagaaaatacctgaaaatactgaaattataaaacaaggtgatgaaggtgatttcttttatgttgttgaaaatggtactgttgattatttagttaatggtaaagttgtaaatacttcaactgatggttcatcatttggtgaattagccttaatgtataattctccaagagctgcaactgttattgctaaaactgattgtattttatgggctttggatagaatgacatttagacgaattttattagatggtacagcaaagagaagaagtttatatgaaaatttcttaaaagaagttccagttttacaatctttatcaccttatgaaagatcaaaattagctgatgctttaaatactaaaactttccaatctggtgaaaatgttgttactgaaggtgaagcaggtgataatttttattttattgaaaatggtacagcagaagttattaaggaaggtcatggagttgttgcaactttaaataaaggtgattattttggtgaattagcattattatatgattctccaagacaagcaactgttaaagctataactcctttaaaggcagtttgtttgaataaaaatggtttccaaagattattaggtccagctgttgatatattaaaattacatgatccaacaaagcattaataaatgtcttttcatctttttattacatattatattatattatactatatttttatctaattcatttgtttttttcatgcttttttttgttttatttaccatgtcattaaataattatataaataataggatatatcttctttgtaagaaaaattaaatacagttaaataaagtcattaaattaattgattaattaattaattaaacctgtataataatctttttgtaaaatcatccaagtaattgataaggttgaaacaattaatggaccaaataatcctttatcaaatttacatgtcttaaagattaaccattcactaccgaaatgccataatgcaataatatatgaaacaatacataaattataaacatgaacatcagtcatattaaatgctgcatatgcacgaataattgcactaaccaatgtccaagtaccaaatgtacgtgcacttaatgatgaaacttcttcaggtttatttgcataaactttctttgttaatgaaatatttgtataagtttgtaatgaattgaaaattgcaacaactgaaatagataaaatccattttggtagataacctggagttgctggaattatcttagtaagaataccttctaacattgtgatagtttcgttgataaattgataataaaagatgtcatgagatctggagattatattatatacgatttacaataatttcatgtccactaaaatcgctccatgtttttataataataatagcatcatttggtaacctttataacacacttctttttctttgaacaaatacccaattacttacaatggtatgtatattatcatcaatttactattacaacacaatactaacaaatttctaatttagtcagatgaagcatatgatgcagcacttgatattttacgtcgtttagatccaaaatcaatttcaaataatttatcaaatatttgcagattacaaccagaattagcaagtgatttattagcaagtgttgataaaccattaaaatcattaatttgtaagaaaactggtaaagaatttttatgttgtgattataatcgtgatggagattcatatcgttcaccatattcaaatgattatataaatgaatctgatggttcaattgtaccatttgatgatgaagcaccattaccaagtaaaaatttaagagaattagaattaattgctaatgattcatttgatatttatagagatttatattatgaaggtggaatttcaagtgtttatctttgggataaggaagatggtgatgcaacaaatgatggtaaattaggatttgatggtgttgtattaataaagaaaacagttgataataattcatcatgggattcaattcatgttttcgaaattgaatataaacaaggttcagaatcaatttatagagttacatcaacaattattcttgatctttcaaatgatttaactaaatctacaaaattgaattctacatatttaagtggtaatttaacaagacaaactgagaaaactgtatcgtttaaagattcaacaactcatatagctaatattggttcaattattgaagatgttgaaattcaaatgagaaatatgttacaagaagtttattttggtaaaactaaggatgttttaagtgatattagatccttagaggcacttccacagagaaatgaagcaaagcaaagacaagaatctcttatcaataagtttgaaaacctttaataagtatttgtagaccgatatagcagtagtataattagtaaccacattacgtaacattgaaacctaatttcctcgcttttttcggccaacatgaaaatcagtggctttttccaaagttcaacgttctagtaattttatgtagagttgggatactagtagatacgggaaatggcaactacagtatcaagggtatatgcgaatgtgaacaagactaaacctcaagaatattgggattatgaaaatatttcaatcatatggggtgttcaatcaaaatatgaaattggtgataaagttggtagaggtaaatatagtgaagttttcgatggttttgcattaccatcaggtaaaagagttattattaaagctttaaaaccaataaagagaaagaaaattaaaagagaaattaaaattttacaaaatttatcaggtggtccacatataattcaattatatgatatagtgagagaacaaacaagtaaaatgagtgctctaatatttgaatatgttaataatagagaatttcgttcattatatccaacatttactgattatgatattagattttatatgtttcaagttttagaagctttagattatgcacattcaatgggtataatgcatagagatgttaaacctcataatataatgattgatcattcaattaaaactttaagattaattgattgggggttagcagaattttatcatcctggtactgaatataatgttagagttgcatcaagatattttaaagggcctgaattattagtagattttagatattatgattattcattagatttatggtcatttggtgcaacaattgcttcaattgttttccgaaaagaacctttctttcatggtaaatcaaatactgatcaattagttcaaatagctagagttttaggtactgatgatttatacagttatttgaaaaaatatagcttagaattaggtccagaatatgaagatttaggtcattatacaagaagaccttggacaagatttgttaatgctaataataatcatttggtttgtgatgaatttttagatttaatagataaagttttacgatacgatcatcaagagagattaactgcaaaggaagcaatgatgcatccttattttgatccagtaagagaacaagcaaaggcaaaataaaataaatttgaatatttaatccgttttttttaaactctatctctgtaatctatattatcacttaatttgggcttcttctttatttttctaacacctttttttatgtatcatcaataagtttacttctacttctacgaaaaactcttatgagctcggtgtttccatttaatattaaaaatgatagtaattttctcaatctttcctcaatgaaaaacctatctgataaaatcgaaccatttttttggaaactaattatgatgaataatagttggattaaatagtaaagtaagatttgtaaattgtttgcattatctgaaattgttagcttatttttaactttatgattttttattcttttataatagctttcacgatatttttcaaggttttgcttcccatttaaagaatttaaatatattaaatcaaaaatatgctgaaatactaaatcatattgaaacctatctctttttgtaaatttttcaaaattaattgaatagcagttaatggttattttaaaaatttcatgtagtcttgcatttgtgatagttatacatttaaaaattatatgaaagaaattcaaaaatccacttgataagtgatttttactggtcaatttagatttattctcttccttatttagtttattaaactttttgaaaataaaagtaattgtcttgttcaatgtttcataagtaattgtactcagcttattagtttttattaatagttttctaatttctaaaatttccttattcgtatcaattaaaggaggtggcggctttgctactggtaggtttccacaagtttcaatgggaggtgaacttgctaatttttctggctcagccgactcataagttatttgtgattcataaacagtttgtgactgacatagctcactcttttgtgtttgtgattctactattcctaattgtgagaaactttgtgtttcattatttggtgtaagtgtcaatgaatctatattggatttgatcaactctgtattttgtgatacctccatagagctcttagtagatgactgattttgcaagattttatggttctcatttggtatagctacttgtgattcaacaatttcaacaaatggtgatttatcaattactacatcagaaatttttgaattttgtgattgtgaatatatttcattgaattggctccccacaccagtaaagctatatacttgtgattctatttcatcaaataactcattctgatcaatgattgtattgttgggatcaacgaaactattattatcacagttattgtaattgaggctcagctgtggaaatgaatcattaatttgtgaactttgtagactctgtaagctttgtaagctctgtgttgattgatttcccaaggagttcattacacgctggatattatcttttaaaagcatgatatatagtgacatactgattgtggttgagttatttcttttataattgcgtttacgtagcaccaatgccaaagccttgattttataagttagtaaaattatattcacattgtaaaatcatggtatacatacaagatcaatatcattaatcatttatctgaataaacttattataaaatgaagataacaagaaaagtacaataaaatttggaaagaagtgaaaagatgaaaaaatgcaagatatatgctatgttgatggtatgtgtgggaaaatcattcatgctattttattaaaatcacacttgagaatctgtgtattcttcccctaagtcattatcatcatctttctttttaccgatgactggcattggtaccggttcaactacataataagagttttgatgagttgctaaaccggcataagcatggtaccaagctaataaagctgccatgacaccaactacaccagctgcaacctcagctgaatgcatatcataaaatctaaaaattgttaataacaataatcttaaaaagaccaaaacaaacaataagaagaataaaatagttgatttaattgtacaagccagtaaaataattgtgaacaataaccaaccgagataaaagaatcccattgaaagattcaattcttcagtagttgtataagatacatcaccatgaaaccatggaattttatttgcagctgaagccatccaataccccccaaaggaacaaaaggctaaaccaccaaaggcattttcaagtgaaatttcccataatccggcaacaaattgaataaaaccaccataaaacattgcagcaccattattaatattatcatttgaaacacctcttgtcccacaattaattaatgatgcaacaaatgtacaatatgcaaaagcacttaaacctaatggggctggattaccaaatttatgaattgatggtactgaccatcctggattcatttgaccaccaaatgctttgactaaatcttgtttacgaaattttttgttatccataaaaatataatcaccatcatcatgaacttgtgagattgataaatgtgccattggtaaattaattgcagaatgatgatgtaaaggttgttgttggcgatgatgaagttgatggtgagaagtttcttcatgtttaatttcaaaagagtttgaatgacttacttcatgatgttcggagtttcccttaaattcggacattttgataataatgttgaaatatttaattaattaacaaattaaggttttttgttaggatgtgatacttttgatgatttaagaaataattaaattacttcagacacggcaagagcatttaattgaaaaaaataatagcaaattgacatttatttaaatgattcatgaatcacactttgcagtcatgctaccccaagtattgctaaatagaagatatttcaaaatccatatttcagggaccattatgaactgggggaagggatgttactttaaagaaaataataataaagttgtttaaatatgcccacgacttacattatgaactcctcccacggagtaaaattgagtggacaaacggagataaaaagaagttagatagatagagatagatagaagatatgttaacaataaacagatgcattgatgatattactatcaacaatttcagatatacatgtagaatacaggatgcagttatataactatacaacggacatccagttaaagtaatgtgtaagatggactcaatgtcggacatactgtttctattgacagccggagatatcttgtccctacggagtattacggggaagaaagagggagaaggacgatgagccgcagtgggtagtattgctgattacgtaaacatattagtctataatgctatgtgtgtgtctataggtataagctattattacaacaaattaaagaatggtataattatacagtctctaaggaggagaatcatcaatgtggagagttaaaagtgtcaaaaatagatatttaataaaatcaattttgtgggattttaaaatcaatgggtcatttcatacaattcagaaaggggttcaatatcttgtaacataccaggagccagtaaatcccaaataactccacaatttggcttttttgcattatcaactttaattaattttgaatttgtaacaataaaatcacatacagtatcgaaaaatttcaggatttaattcaatacctgataataattgaacatcatgaacaactgcgacacattttgttttatttaaatctaatgcattaatcattgataacattgcccattctaaatcgaaaaatccatgacctttaccaaatcttatacctttatcattaattgcaccagtacctgtaatcattaaaggtacaaaaatatttaattgtttaatttcatttaacgaaacatgagttgataatttttccattccatctaaagttgaagcatatttatataattttggatcaattttagctggatcaacaatgaaaaaacctctgaagataccataagttgtcattaagaaaggtatacccatttctaataattcatatctaagagattcaagacaattatcaggtgtaatgaaaattaaatttttgtcattattattattattatttccattattttggatactctctttgaaaaaatcactatctaagattaatttagttgaattatctgaaccttggaaatctgcaataaattctgcaaaattataatggaaacgtgaatcagggtatgcaactttacgtaattctttccaaacttgtgaacgtatatcaaatttatgcttttgtaattcttcagttgttgattgtggtgaagataagtttgagaattccgacatttttttatttgttttgttgatgaaggaaggaatgatatgtaagaaaaaaatgttattaaaaggaacttgaacttagaggtaattcttttttgattttgtttaaaggagcaagagttatatggtcttttatttatatattaatatattatagttattaatcaaactaagcaatcatatgaaaaggttttaaagcaacgatatatatatcaatgtgattacaattccgaatactttcaagttttaaatgaataaagcacaatcaaaaaaaaaaaaaaaatgttgaaaagttccttcggttcggacctgaaataatgttgagtaaatttgttccgtacggaattggtgagtaatgcctataaattttgtattggtagttatataactataagaataattagactacaagatataataagtaagtgaaaatttttgtctattaaagtgataataaaaaaatttcatcaagggttcattacagaatatgatgattattgttgaacccctgaataaaagaaaggtacttataaagaaagattcaaagataaaaccaaccaaagtgataagaatccttatcagttgaaaaaaatagttccgctcattgaaaagacccgactgaaacactaaaccctggtaaaaaagcagaataaaaagaaacgagcagtcaaaatagtataatttatccacggccccaattattattacacggcatttcaattaccctgctttctcaaaagagaaggcacgcacaagaccgttccgtataaaaagaatagctctccaatgctaaccgcggacactttactatgcaatcctcgtatacaaccctcttaacgcgtatacaaccctgaattacgcggaatatatcatcttatctcagagtcaatgactatattaattagcgttcgtaatcgaataacatgtcagaaattttcattttttcttattttttctcatttttgtaattattttattattttattattacactatctgttatctctcagaatgactctaaattaatcagttaattaattaaacgtctttttcttaaatatttttttttttcaatttccttatataaatctttatttgtctgcccttcttttctgttgtatatcaattccatctatcgaatcttcacatctttttcttctaattgcttattctttattctctttctttcctctcttccttctgcaagcaaatttaaagatgtcttccatgtcagatgaaaaaccttctgttgataatgtcccaattatggactcaaagaatgaaatagaaccagtattatcaaaacctttaaatcttcatgatattacttcaaatccaattgaagctgctttaccttatgcaattgataatccttatcatcctttccattggagtttaaagaaaaaatattttattacaattgtttattgtattttacaaatttttgttactcttacttcaacttcttatgttgccgttgaatttattgttgaagaaaaatatggtgttagtgatcaagttgcaactttaggtcaatctttattcattattggtactgctgttggtcctgcattcatgggtccattatctgatttaggtggtagaaaatgggtttacgttttctcaattatcttttatgttatctttaattttggttgtgctttcccacttaatatgccaatgattgctattttcatgtttattattggtacttgtggttcaactgccttatctaatgttgctggtacaattggtgatatgtttggtgcttctgatgaagcttctcaaccaatggctttattcgtttttgctgctaatgcaggtccttcaattggtggtattgtcggtgaagcaattgcagaaaattctaaacttggttataaatggatttttattattaatattattattggtgcagcttttgttgtttgcttatgttttattccagaaactttaccaagaattgtaattgaagaagcaactgcaatggaaggtagagacgatattccaggtattgtttggagagaatttggttattttaaagaaactttaatgggtaaaactccttcttatagaattatttacgaagaaaaattatcaagtgaaggtcaagaagctgttattattgaaaaatcttcaacttttaatgaaatgagatttattgcattgcaagctcttaaaatgatggttactgaaccaattattatatttatgggtttatataatggttttgcttatggtattttattcctttacatggatggtatctttgatgttttcgttttcaataatggtttatcagcaattgcagctgaatgtacttatttaaattttgttgttggtgtcgcatttgttatcttattacaacctattcaaacttggttatttaaatgggataaagctagaaatggcggtgttccaagacctgaagctagatttatgttatcattagtcactgtttggggtttcccattaggtcttttctggtttggtttcacttcagatggttcagttaattattggtcaccaattatggctggttttgtcttagctgttgcagatcctttactttggttagctatgttaagttatattattgattcatattccgctgctggtttatcaaattctgcaattgcagctttctgtattccatcatttgcaattgctgcttgtttagctcatgccggtgttgctatgtttaacaatatgtcaactacttgggcaatggcaactttaggtttcatttcaattggtattgttgccttagtttacattttcttcttctttggtgttaaattaagaagtgcttctaaattagcaaaatactcagttgttaattaatttaaagacttttcttttactaaacttgtacattgaaatttaaacttacacttatatttttgattattattatagagaagtttatgagttgaaaattttttttttcccaacaattatcaatccctaaaattaattcttttattctattcttgtttttactgtttaatatgctattttgctcttctactacataactctttttatattctatcaaaatctagtaacaaatctagtaatacgaaaagatatatgaatgaaactataaaaattaaacaatagtaaaacaataggaaatctcaaatttgagttttcccccactcttcccttgaatttatccacagtgactaaattaaattctttgactcgactagtgtgattgcctcccttcaccatttcatctaatacacaatacaaacagcttgtattgttcaaggcaatagctaataatcataattaaactttttagagttgttaatcacatttttgttatagacactctaacctgttaataaactatatattcaatttaaaaaaaaaactcagccatcttagtttttcttatcagtttggtttctactaaattattattcacattccttaaacaatgattcatcaacaaaatcatcaaaaagatattcagaaagatacaaaggatcatgtatcttctcctaaattatcaaacaattcatcaatatcaaattcaatgataaattccactccctcattaccaccacatataactaatgatccatcagattcaaataatcagtcgatatttcaacaatttcaacagtattctgtgaatcatcaacaaaatacacaaacacagcagcaccaacaacaacaaccacatttgcaacaaccattacaggtgccaacacaaacacagttacaacaaccgcagccaccacatttaatgcatttaccactacatcaacaaaatgttttgaatagaagattacaacctggtatttcacaaccatcagatcctgctctacagagattgggactcagtagaagagttagtactcatatgcaaagattaccaccattatcaaatattcatagtggttcatcacccgcttcctcaccaaatggtgcattattaaataatgattatcaaaatttacaaagttatcaattacaacaaaatacacctcaattgtcaccatcagataagccattatttaaaaatgtttggggatttaatgaatttgtcgatcaagcatccccaaccaacagttctttctatatcaaaagtaattatcaatcaccgatatcatcaaattatcaacaacagcgaatgaattcaatatctggtgttccaaattcgactctgaatgtaagtccattgaggagtaatgttagtatgacaccatcaaatttatcaatgtcacaactgagtcataataatagtatcaatgtaaatgataacgaacaaatagctaattttaataatgtgagaagtaattcatttgctgtaccaaactcaaaattcaataattttggtgacaatacatctaacaatgcagatttattaaaacaaaggcaaattaatcaaatacaacaacagaaacaacaaaagcaacttcataatcaacatttacaattattacaattacaacaacaacaattacaacaacgtcgatattcacaacaatatgaaccaagattatcaaatattaatatgcaaccaaacatgagttctaatagtagtttaagcaataagtaatatgaatttaagtattgaaagtcaacaacaacaaattattccgccattaagagcattaggacctgttcaatcattcaatgatatggcatcacttaattctaataatgcgccaagacgtgaaagtgtggcagctgtttatcataatcaacgattatatgatgatgatctttacaataatgaacttagaaacaatagagatagacaaacatcagagacaagtatgatgtcaattgatgatttgaatgaaatatataatcaacattatggtacacctaatataatacccaacaatatcaataataataataatactaatatagtaataattatgattataataatgtaagtttttcaaatgatagcattaacttacaaaatgatatgagagccgattcattagtgaataaggtacaaacaccaagatttgagaaaatcaattcagttgatgatctgtctcctattattcatgaagttcctaaatttcgtagagttatagaaaatgataataaaactaaacaatatgtttcaccattaaaagcattaacatctgaacttaattcaacttattctatttgtgttccagaatatgattatcaaagtagtaagaatcctagaagagttttaactaaaaataataaaccatttcataataatggatatgataatgaatcatatgattatattttatacgttaatgatattctaggtacagaggaaaataaaaaatatttggttattgatatattaggccaaggtacatttggacaagttgttaaatgtcaaaatttgaaaactaatgaaattgtggcaatcaaagttgttaaggcaagacaagaatgtttacaacaatcaattacggagggtaatatcttagaatatttgagtaaaagagttgatcctaaatatgagaaatattttattagtttgaaagataaatttatgcataaatatcatttatgtttagtatttgaattgttaagctctaatttatatgaattgattaaacaaaatcatcatcatggattgaatattaaattagttaagaattttgcaattcaaattttagaaagtttatgtgcattaaaggatattaaactgattcattgtgatttaaaacctgaaaatattctgcttaaatcattagataaacctgatttaaagattattgattttgggagtgcatgtcaagagagacaaacattatacacatatgttcaatcaagattttatagatcaccggaagttatattaggagttgaatattcaactagtgttgatatgtggtcatttggatgtataattgcggaattatttcttggattacctatatttcctggtgcatcagaatatgaacaattatgtcgtattgttgaaacattaggaatgccaccatcatggatgatggttgaaaaaaaatcaaataattatattgttaaggaaagaaatttacaaacaggtaaaatatcattcagattaaaatcacttaatgaatttaatactgaatttaatttgaatgaggcaccaccaaaacaatattttagtgataaaaagattgatgatattataatgaattatagaatttcaaagagaaagaatccaacaaaggaaatgattgaaaatgaaatgcatgaaagatcatgtttagttcattttcttaaaggtataatgaatcttaatccattagagagatggacaccacatgaggcagtacaccatccatttgtcactaatgagccatggactgggacctggttcccacctacagctataggtcaaccatcacatggaagtggtttaagatcaagaagtcttgtatagtcgtataatacatgtataccattacgtaacagtcgacgcaccgacgccaaagtaatgaaaaattgcccttctccgataatttttcagtttgcaaactctctctcagcggagactcacaaatttttcagatttaatcagtcagctcttatattaaacgattagattcatttgttaagttacagttattataaacaagtaaatatgtctacacctgaagcagatcattcaagagatccatgtcctattgttattcttaacgattttggtggagcttatgctatgggtgttattggtggttcaatttggcatggtattaaaggttttagaaattcaccatacggtgaaagaagaattggtgcattaagtgcaataaaggcaagagcaccagttgttggtggtaattttggtgtttggggtggtctgttctcattttatgattgttcaattaaggcaattcgtaaacgtgaagatgcttggaatgcaattattgcaggtttctgtgttggtggttctcttgctgttagaggtggaaggaaacatatgttaaattctgctattacttgtgctatcttcttaggtattcttgaaggtgtcggtatgatgtttcaaagatatatggcttatgctaataaacctgtacctatgcctgtgcctgatcaaggtgctgctccacttggtgcttgattttcaaatagtgtaagtggatcattattatactatgcttgtaaatataataataaataataaaatacaacaatacaataaaaaaaatacaggttgttttatcatttaatcatcttttaagattttagaaactattttcgttataagatcagttttaaacttttatatctttacatctttatatctttatatctttatatctttatatctttatgttagttatgttccttatcataaactgtgaattatatgtctttggttaaaagaaaggtttattacagctgtaaaaaattacgtaatccttgacaaagttgtcatttcacttctcaccaaaacaatgaaataggttcaatacttgcttcgtttctgtaacttcctctttgaacatctagcaaatttcagtataatgaacttgtctacatccgcagttgttgttagaagaagaggtggtaaagctaaccaaccagaagatgaaggaaaatgcatcatgaacttaaattaggtccagaatttcaacttgaacaagttgatgctttaggtaatgaatcaaaattagttgcacttaatttaagtgaagctcgtatattaattcgtactgaattaaaggaacgtgcagaacttatatctaaaattaatggtacaaatattgattttttaaatgcaccaggtgaaccagaggatgaacaattagcaaaattatcaacagctccaggtgcaaatgaaattttacgtaaaactttagaatatttatcaacattttcaagatttaaagatgttgaaacttgtacagctgttgaaacattattgaaaagtgaagaaaattcaattttacatccatttgaaatttctcaattaggttcattatcttgtgaagatatcgatgaagcaacgactttaattccaagtttagttgataaaaaggataaaattgatcttcaaagaattttagatgaacttaatagattagaatcaaactatgcttaattgctttaataattaatattatattcttttccatattcgtgtattcttatctttatatttatttttctatactttacttttacttttctatatacatctgtacttattaattaacagtctaaaattacaaaaaattaattttaaatgatcctttatttcattgctttaatagttttttaagttgctaaatattcatcttcatgataatactcttttaaaaactttttacctgaaccaaatttccaccatcttggtaaacaactacctaatttaacatttatattatctttatcctttggaacaacacatcttttatatttagttacttgtctaccttcaggatatgtgaaaaatggaacatgattataaccaatatcttcaaaatgtaaaatttcatctttatctaataataaaactgcaccaattgaatgaactggggcatcaccccatctttcataataaaatccaccagatttacttaaatattcaaaataatcaagatattcctttgatctgaaaaaatttaaatcaccaatttcaaaatttgaccaaaagtgacataaattatatgatgaattacctaaatctaatgcatttgtaccgattggtgctttacttgttaaaaattcaatagctgaatttggatgtaaatatgatggatgttcatttaaaaaatcttcaactgtatcccaaagtgttggaattgtttcaggatattcatataatgatacaacaaaagtatattttttaccactttcctctaagtaatctaaaaggatccatttgaaaatcacaaaaatattcaactcctggttcaactctaaaataataatcatattttaaagttaattcttgcctgaagaaataacctgaattaaaatgacacatattcctataagattttgaaaatccataaataatatcatcctttattgctttttcaattgatttttcatatttttcttgatcaataaatgaaggtgtattccaatcttctcttgggattaaaccatattcagttttaccacttgccatttcagttgtccacattataaattcttcatcaaatggtacatcattcaaaaatgtccaaggataatgataatttttattaaatctatcctcaagtgatctcattgatgataaaatatcctttaattcccaattacgacataaaactaataaagttgcattctctaatttaatatttccattatcaaacactgatttatcaatattatcatcatttcttaatttttctaaatttttatcagttaaataaattggttcaacataagagtttgttgcacctttaagttttgcacgattaaggaaaaattgtgcatcatctgatctattttggtatatttcttcaaatgtattaaatttagaaattatagaatgttctaatagtaactaatctagtaaatatatggaaatataagtataggatattaccaataaaggtaccagcctccgtaataaacccaacataacctgcttgtggatatatagcaatcttgattaatcaattcaatgaatactcaactcgatattaaattctcaacaatcgaaaaatttcgtaattgatagcatgtcgaaggctcagcatttttaaatcagattttcatttcttattgtccctagcagactgttttaaactgtttgctaccattttacaatgtagtttgtatacacttatagtagaatatttaacacatactgtttatcacagcatactaatgaatacccacataatgtgatcatagatgaaaagacacaaactacatgcttataacagaataaaagacatgtaagaaaagtagcaaacattgctatcattaaatagagtgtagtacatcaaagaacgtcgtagaaggtttaaaggaggggtatgtagcttataataagattagattgaaaattgcccccctttgcagaaactatgtataaaagggcaacaatttcttctgtttgagctttttgccttttcattttcatttcatttcattttcatttcatttcgttttattctgttactgctatttcctcttgaagtatggaattattctgttacaccagaatgctataaataccagctttgcggcgtccttcaaacctttatggacactgcttgaccttttttgctattacttaatttttcttttcacaaactaataatctacctaattaatatatacaatgaactttaaacatcaattaattactatcattttattattcaccaccggtatcaacgcactatttatcaacagtacatcagaattctggaatgatacttctgccttctgctagttcaattagtaatgaagtcttcaattcaatggcaagagctgctgattacgcttccctttcttatctcacacagggtaatttacttaaattaggtaatataaaagatgcttgtttatgtactttatgtacagattcttattctggtgtcagtgttgaaaagatttatagtggtattgtttctggtgtgattttaaaagatgattatagaagagaaattattctttcaataaaaggtacaacaactaatactgaatggttgttagattttaatttcactcctattccatatcgtcctttcagcagaagtaaaaatggttggaagaaatatcttggcactaacaaagagtgcaagaattgcggtgtccatagaggtttctatgacgcctgcaaagataatatatgacaatttatttcctactttgctgaaactatcaaacgaaaatttaaactacaaaattgttttaactggacattcactaggtggtgcattagcaccttttattgcaacagaatgtttattaatgggtaaatatcctacagttgttacatttggtgctccaaaaattggtaactctaaattttcgtcatggatggatgaaatctgggaaacaaagaataattatgcgtctttagatgctggctatattggtgataaaaatcctacatatctcagagtcacacatagaggtgattatgttcctcttgttccaacccgaacaaatgggttatagacactgtggtattgatatatatttcaatattaatgagcttccatttgatactttacaagtggaattaaagaattctcctagtcgggatatgacaactgaggagttcaatgagttgagaaagtagcattgaagagtataataaagtgccagatacacatttattatattttattaaaatgaatcaatgctatttttcaactcattgaagaattcttaagcccaacttgaaaggtatcaaacattattgattttaaaatatttccacactgcttataactcatttgttcaaagaaacattctgaaacataatcttttttataactaactctaaaataagtcaagtttttgttgtataatttctttaactattgtctataatcttataatacacacactatatattttcacccttcttcaagattggaagtgatttttcatcagcacgtaaatgaatatcaacaattccttcaattcccttactcagtactccaccaattggtctataattttcatttgtaagataatccagaacagcatctatattttcaacaacttgaattcctttcattttagaatatccaacaataattgataatgaaggaccaacagagggaacaaaagttgtatttttacaccatgatttgatttgtgagaggatatattcaggatcaacacgttcatctgacattttacctgatcttttagatttaactaatttagcatcaacatcctgtggtgccatttgtaacattaatgggaaattttgtgaagttttacagaaaactgttggaccaagtaattttggtaataatgaatgtaatctattatcagttataactatatcatattcataattggtctttaaagcagccttacttgttcctaccattgatttaaatttcttataaccaacaatatctgcaaatgtatcagttgtaactgattccttatcatttaatggaatacgataagtatcaactggatctttagtaactaataaaattgttgtatttttaacactacgtaatctatttggtataacaatcatacgcctcgtgtattcttttgtcttgctggttggtaaaagagtacttaattgtaacattattggttctgatgttttaccatctttgtttaatttatatatctgtgcttctgctgcaagtaatgccttttccctaagtgtttcagttaatactttatattcatattctttcttttctttcaatttcttttcctcgacaactttcttctttaatatcccctttttacccatctttaagtatgtgttttgctataagaagaatcatccaatgattgacactcttacaaaacctactgaaaaattataagtgattgaaaaaaaattttaagaatctgcgccacagagaaagaaaatttatcttatcttaagatggcgcagttatcgaatgtattatcgaattaaacacatcgaagagaagattttcaactttaaatccattgtcatttacaatattcgttaaacaaaactaactaactcaagtatcatggatataataaaatttattataagattctttttgagatttctttttgcaaatgagatcaaaaacgtaactgaagtagaggaatgtttctacagattatccaatcacacatcattgttatctacaatgtccagaaccttcagtttcaaccactaaacacaaccctgttcttttatggcacggaatgggtgattcatataattcacatgcaatgcaatgtttagctaatactatagagaaaacacatccaggtattgaaattcattcaatttacatagaagaggatggatcagatgataaatctgcatcagtttggggtgatgcattgactcaaattggtaaagtatgtgatcaaataaaaaatttaccatacgatgaagatacagttttcaatggtatgggattttcacaaggtgggttgtttattagatcattagtacaaacttgtgatattaaatttaataatgttattgcagttggtagtccacaaaatggatttgctgatttacctgaatgtgaaccagataatatgatgtgtaaaacaagaaataaattgattaaaaatagtctctatactgattacatgcaaaataataatattcaagcacaatatttcagagatgttgaacaatacgatacttatattgaaaaatcagcttatcttaaatacgttaataatgagttattcaaggatttattatattatgaacgattgactgcattgaataagtttgtgatggtcttgtttgatcaagatgaaactttggtgcctaaagaaaccgcttggttctacgatattgataaggttactggtgagcttattccttttaatcaaacagaatcgtataaggatgatttgttaggactaagaaagctagatgaggaaaataaagtggactttttaagtattgatgatctccacttaagactgtcagaggatgatgttatctatttagctaaaacctacctttaaataaatactttttatttcaatactttacatagtataattagctacacagttaataaatcaatcaaactcaatatcagagtctaaaaatcctaatacttcttttggatttatatgaatatctgttgttgatgtcattaccgtatcttcaagattttcaattgaaccatttgaactatcaaatgtcttttcatatgatttactctcgtggggttttacccttttgtttgaaatgatgatcggtaatttattgacttttggtaattccagattagttataacaacatcttcaaccgacataatacgatttctgtttggattgattagttcaacattcttcttctctatcttttccaatggtttctgtttagcaattcgtacagcagatgcaatatcagtggtattcttcacttcattttgcggtttcattaatttagttctcttaaaattatcattctttgaaatcttttgaactcttttacgtgatgtgagtaccatgtttaaagcaccatcaaaggaatcactgaaatcatcagaatcgtcttcactcatatccaaaagtttactttcattggtattagttgggttgctaactttgaatgcatcattaaaatactttgatgtctcaagtcttttgaatttgatttcggaattacttttttggttcactgctctattggttatatcttttaacggcactctttgttcaattcttttcaagaatacaggaagttcagctactttggcattactctgaactgctggctttttactcaacaattcatcatcacttgatgactcaatttcttcatatgacgaaacattatttgcacgtttatctaattccataaatgaatttgcagctgatttacctttacttaataaactcaagtctaaagtattctgccttgctgctttagccttggttttagcttcatattcgaattgctccctacagcacatgtgacgacacttacttttatctttacatgcatgtttgcaagatttaactttatttgtgggtataccttctttacagcaaatatgacgacatttttgcttatcaacacatttatgtgcacaatccataaaactgggttcagtactcaaactggtatcattggtttcaatttttgaattttgggtatccaattttggtgtatcgttttctatttttttaaaagtaccaacagtaccaactttactatcatcatcatctaaaagtcctaaagcaatatcatcagcatcatcgaaaacaaaagagtcattgttatcatcgcttttattatcctctaccttcttcaaaaaattaccgggtttatttggtaaacatgaaactgctttagagacatcaacttcacatgattgacccactgctgcaatttcatcacaattaaaatgtatcttcacataatctgacttatactttaagttaattttcaaagtaaatcttttaccaccaaccaatttttttaatggaagtctacggaaatcaaatatttctccaccaacatctgttaatacattaatatgaacaaaacaaccattccaaacaaatgatatattattatctttattcaatagatcaacataaacttcaaattcaactaatccattattgtttaatttcaagttttccacttttaaacttagttctggcatattagcaatactcttagcaattttctgtcctgcaccaggttttaaacctaaataatattcaagtttatctcttggtaactttttcaattcagcaaatgttgttatcttcttactcattagctttttttgcatatgctaaaccgataccatcaaattgtttcaaaactaatgacgtattttcccaacttttagcacaaatacatctattaaattttaacatcgattgcaatgaaattgaatctttttcaaatactaatatttcaattgctgctttgataattcttggcaaattcttgaaaatcattaatctttctgacacaaattcatgatgcaacttcatacttccctggtatgttggatattgaattccaccaagttcatattggataattatagataccttttcggctggtgtttcgattttattactatttggcaaaggcttaaacattaaggggttctggttgatttccttatataattttctttgtggcatttttaccctaagattgtcaaattcatgtgattttgataataatgttaaacaatcacctaatgacatttggtcttttctttgaataatatttttgatagtttcatataaaacgtaactcttactcaatgcatttccatagacggtacaaacaaattgcttatcgacaacttcaattattttctccctaattaattcatcgataacatctttcaaataaattctaagttgaacttctaatggatgatttgaattaacttttgatagaattaaaggataaccagtaggattttgcatataacgttgataaaagaatgttgattgtaaccaattaaaagcagactctaatgatgtaatagttttcaatgttatttctgcagtaacattttcataaatattaagatgtaaggaactttccaatttttctgtacctttaaccaatcttaaatatctatccttctgtgatgaatctgtcattataacacatgcaccttcagtttcaaattgtggtctaccagctctacccatcatttgcatcaaatcaagttcattatattcttccattgattcattattccaaactttagttcctttgataataactaaatatgcaggtaaattaacaccaactgcaagagtcgatgttgaacataatatcttaatatttcccttaatgaaattatcttcaataaattttctttcacctgtagttaatccagcatgatgatatgcaatacctttttgaatcaattctgaaatttctttacttataccagtaggtatatttgaaatcgaattattattatcaggcattgagtaatccttcagcaagaacttagcagttgcaattgaactatttctagttggacagaaaatcaacactggtttattcttagaatgtaatttaagaacttcaggtagtttaccatttaagaacatttcaaacttgaatggatttgaagttccagcagttttatatccataaacagttttattcagtttaacagctctgtatgaatcatcatagactaatgtttgtatattactattattattattatttctaccatttgaatttcccaaccaattagaaacatcataaatattcggaactgttgcacttaaagcaattattcttaaatttaatgacattgttttcattcttgtgataacaacttctaaactcgtacctcttttttctcttaaaaaatggatttcatcaacaagtaataatttaaccaaatctaataatttactataatctgaccatcttctagttaatgcatcccatttctctggtgtacaaacgattaaatctgattttttaacagaatcaagttcaacaaatgatgaatcaccagtaagtaaaccaacgttacaattcaatgatttaaattttttacaccaatcatcatatctttcattacataatgccttagttggtgccatatataatatttttgaatttttaatattataatctggattatttaatttgagtgttaataatttaatgattgctaattcaaataatacggttttaccggaaccagttggacttgatataacacaattatcatcagttttgtaaatttggtcaaatgattccgattgcattttattaaaatgtgtaaaagggaaaattgatctgtatctctcaggtatttgattaacatttacatttttcgaaatattaccaccatttaattgtgtaggtgtaggtttaatatatttacttctataattattattgtgattctgatttcgtgttaagttttcaaaatcatcagaattatcactacttatcagtgagatttcatctataaaatataatcagttagtaacagttaaaaagggggacaaaattaaaagcattacagtcaattcatacgctgtaagctactctggtactgcatgaatattccaatagttgctttgatcagatagtaaaaaagtgtattaaagtggcaaaagtaataaggagtcctaaagggggaataattaatatcctgaaaaggtaaaagtgcggatgtatgccgagtatactgagctgaaatttaagttatgactacaccaacagtgcatgtttttctttcatttattatcaatacttgttcaagaaacaatagaggtaagtattatcagtagatatagactatccaattgaattgtagtaagttttattttattatactttattttactatattaactagacataaattataggaatattatgagtgatgatcaatatggaggtgatgaagagttagagtatgagagtgatgatgaacacattgagatggtttatacagagagtccaatccggaaaagtggatgaagtaccattggttgatgatgtggaatttgtagaggtggaagatgagttagaggaagggttagaagaggaagaagatccagaagaagaaccctgaagaagacattccatttgttgaagaaattccttcatatgttggagaagttgataatgaaaatacttttaaacatgaagctgaagaacaagaatattatgagaaaacaatttgaagaagaatttaaggaagaattaaagagtaataatgacgttgaggaacaaactattgtaactgaagttattgatgattttagtgaatctgaagaagaaggggaagaagaggatcaagaatatgagaatgaaaataatggggaattggatgttactaataatgatttacatatagggcaagatagtatatttgaagataataataatagtgacatcgatgatttaaaagaaatggagaaaattccagtatatcttgattttagtgatttatttggcgataaggataataatagtaataaacaattaacatatgagaaagagcaaatcaatattaattttgattttatgaaattatttcaaccaaaatgtcaagaggatgaattatactctgaattcgattcattatttaatgaattatttgaatgtattgagttaaaatttagtgaaattttcaatagattaaaagatttattaaatattaatcttgatattataaatattgaaataatttttacagatttaaataattttaagattgaatcagatttaaatttttcaaatgaaattaattttggtgatatattaaaaatattttacaatttaaggaatcaaacacctaatggattagaactttacaagatattttctattagaattatgttaagtcgaagtattaaggaacagtttcatgttttaaatagtttatcaatggtcgaaggtacaaaattagaaaacttaggagatacgataaggaaaagagaaggtgattatgaggtagactctactaataataaaaggattaaaagtagtgtattaatgtagtttttttttaataatttgtatatcttttaatagttttttataatgaaacctttttaaattaattaacaatgataattattttgtttgttgtactatagaaagagagtattaagagttttttttatattttattttgatcataattatataaaaatatcacaattaagcagcagttaatctcttttgggaagaaattctacctaattgtcttctagtgaaagcaactttctttttatctgcagcctttgcaacagattcttcttcttcagtaacaataatttcaatatgagatggggaagattggtaagcattaattctaccgtgagctctgaaagttcttcttctcatctttggagcttggttaacttgaatatgagagataactaatttagaagcatctaaaccttttgcttcagcatttgcttgagcattagttaataaaccttgaatgaatttaacagacttttctggccatcttgccttagtaacaccaaattcctttgcttgagcggttctaccaatagaatggttgaatcttctgaatggaattgctctttcatgatcaagaacttgttctaaatatttttgagctttttctaatttccaaccagagacagcttgagcggtttctctagtgttcttgaaagagactcttaagtaagaacctcttgcagaagcagatttagctgggtttgaaggaactgctgcgtatctagccattgttgagtgataatattcaaagggaaattaaatgaaactaaataattagatgataatttaatctctaatataatatacaatcaagtaaatttttcaaaattccagagacaaacgtaattttttcaccaatattcattccccctaactctcaacgcatagttaattactatgggaagagagagagaaaaaatttaaagtgagatatcatctgtacaccatattaaaaaaatttcatcttagatggagtgagggtgtggccgtttttataaacgcagtcacattaattgttagtatgcggtgtgagggtgggaataaagtttagatgctttatttaataacattacgtaatcttttgggaggaaagtaattaatttagtaatagcttaggtaataagaagtaatggtttacgtaatggtaagctgattagataatatttatcttcaaaattccgaagagtaatagtaacaaaggttgaaagactgaattttccgattggaaaatatcaatagacaaaacaagactacattctacaacaaaacttacaaatattacaatggtcaacacactccaacttttttaattgtattacttgtcagacagccacccattcccatcttaaaaaatcacttccgaagaagtacattaattaagacaaagatcattgctcctttatttacctgatgaaaaaaggaataaaaaatgaaatttttaggggtcgcaaatcatccagatgactagattactaagaatcgtagacaaaactgtaatgataatttactattataataaaagaaagaaattcttccaattattacatttattctcactttgagggtatgggggttctatctcatcaaccaagttggggtcagtggctctttagaagagtcaaaaagtgacgattcctatagaaatgatcctatgaagtacgtcgacaaagaaagaagaaatctcaaaagaatataccttaagaaaagtgggaacttactctcttttatacttgaaattttaatttttttcactttaattaaatattacgtaaccaatggtaactaaatgagggtttttattatgttattatcattatataatctttaagattgggttggttatctataaagaagctacattactctataagggtaactaattgataaacataccatttatgaacgtccttatattcttactaatatcaattgtatctgcttttgatatatctaaattcccatttgattcattattaattaatgatgatgctttaggtattcatacattaaaattatctcataatactccaccttcaacaatattcgatgattggtatttccttttcagtaaaggtccctcagatgctgctaaaataggtaatggatgcccagatgattcaacagtttgtgctataatatcaaatacttttggtgataataataaagataaaaatttaattcaatcatttagtttaaatcttgataatgttaattttattggtaataataatttaactgctaattgggaaaatgttaaatatggtgatttgaatttaaatgttaatataaatttcgaatgttcagattcatttgatgatgatattcaatggattgatccaacttatttaattcaaaatgatttaacattcagttggaaaaataaatatttttgttcaagtgatggtaaagataataatggtgataataataatgataataataaacctaagaatgaatcaagtatgggattttttggttctttcataattatttcagctattatatttgcagcttatttagttgctcaagcttggtataatacaagtacaatgggtacatcaagtgaatttcttaatgaattatttgatacagttattgaaagtttatctacaattccacgtatattaatggaaataataggtaaaattacaggtagttcatcatcttcaagaggtggttatagtgctgtataagttatttatataaaaaaagattaataatctattcattgtgttccaattactttcttcaaactatccattgtattcttaattgaagtttcaagataatgtttctttttattaagattattcattgattcaatattatctctaattttactcttcatttcaatttcatattcggtaatgggtattttaacaaatgcacgaccaactgattcccaaacaaatttttcattactattcttaatatctttcattgatttttcaataagtgaattattcctactaacattttcaatagtatttaatgttctctgtaattcttctctatgtttggagagttgtacttgcatctccattaccatttgtttaacatctgacattctttaccttgtataccctgtaatatccaagataagtactactacttctattataactaaggttcaaaatgcaggcacatgtgtgtatagtacaaactcgcgatttgaaatagagcaactcagtaaatgctattccgatacaccacttctttatcaatggaatcaaaccctgatttactctacagaaagaagaggaaatccttcaatggattagattcattatattctaaaacaatacaaaaattcaaattaaatgttcaaaaatactttggaattgatttagattcaaattataattataattcaaaatttaatttacctgttataataactgattatttaccaattgttatattattattgatattaaattatttgataaatggtaatataataccaaaaccatttacaatttcaataggtaatcattcaccacctgaaaatttctttaaatttacacaatctaaatttttaggttcctataatttacatggtttaactagtaaaagtacaagttttatacctgttactgataaatatatctttccgagagttcaagatattaatactctaaaagaattgagttatgaagatttttttgatgttgaaacttatggtaatccaaagaatccgaaatctttttacaaatattcacttgatttttatgaagatatagatgaagatgaagagattataaatattgataaagatcaaaatgaaaaggcagttaaaaattcagaaattaaaccaaaatactctctatcacaacaaaatgcgatgaaatcatttaagcaaactggacgtaagatttataaaggtaatgaaaatcctgaaattattttagttacatcaattaattttgagaatttaaatccttcatatattgttaaaattattcaaaatagagtagattatgcacatactaataattatggagtttattcaaggtggaatcaagaatttttaccaatgtttcaaaaaactagaaatagtttagatagttggtcaagaataattgcaattagagaggcaatgattgcattccctaaggcaaaatggttttggtatattgatgaaacttcatttataatgaataatcaaattaatattaataattatatattaaagaaagaatcattagaaccaattatttaaaggatcaatcaattttacaacctgatggatttattaaaacttatagtgatgttaaatttgaagatattagtataattttaacacaaaatgagaatggtatcagtgttgataatttcataataaagaataatttatatggtaaagcaattttaaatttagttttagatccattaatgaaaacttatccaaagtttaaaaaggatgtttcaacaactttatcacatattttacaatggcatccaattttattatctaaaactgttataatacctccaagaacaattaatgcaagagttaataataatgcagatattgatattaaatatacttatcaaaatgatgattttgttattagttttgcgaattgtaaattattagcaaattgtgaaaaacaattaacaccatattgggagaaaactcaattaaagaataaagatgagtagtgtcttttttactatatataacattattctagtttaatatttatataactttaattaatccttacgatcaacactattttctaatacttttaaggcaatttgtttccttctttcattatcaatatctgaatttgattgtaaattatgcgttatggtagtagtaggtgatgaagtagaattacctgaaattcttaaattatttcttaaattaccaatatcaatatcattatcattccaaggttttataatacctaataaggcagataattgataaataccatcaaataaaggttttaatgttgattttaaaaattcagggaaaaattcgattattgcaaaagtatcagatggatcacctctaattaaatttgaagttgttggaggtattgaacttgaagaagattcagttgttggtaaaatttctgaactaattgcaggtgaatattgaatataacgtaaataataccatgaagttaaaaatgatattaaacctggtaaaaatggtgataatgaaaattttaaaattgataaaattaatgatgataataataatatgagaggtaaacgttttaaacgaaatttaaataatgagaataatttaatatttgtctctggagttaattgtttagcaacaacactaattggaataactaatataaataaaccatattgtaaaggtaaatttaaattatttgttgaattatttattatattaattaaggaaattaataaaagagatattaaatttgatgaaattattataatagttgtaaattttaaagtttcagtaattggttttgaagtatttaaatattgactaaaatcatcattaccatcaattgaaatatttggattccattgagattctaaaaatgaaataccgaaataaataatgaataaacctgaaatgaattgaaatggtgaagtttccacaaaagtacttgtccatagagtccaaggatggaatacaatatgagatggaactaattgaagtgaaggtataataatgtcatcaaataaaagttctgaattttgtttgattaaattttgataagattgtgttctaatatatgaagtaattgcagataggaatactgttataccgatataaataaaacttataagaggtacattagataaggatgatactttatctagaatagaatcaaatgacgttgacatgattgatatatataatatactgattcagctgataaaagaaagcagtgatagtaaagtaaaaatagaatatatcaatagaatagtgttaagattaggtaatacaaagtcggttatgttctggaattgaggaaactactcgctacatggaaatcttgggattgacaaatgttgcggtacgcaatttatcgggattagttttccgtgataggaaagtgttatatggtcttatctctttccataagtttctatcgaactatgatcaattgttgggtgcatacatgaaacatgtttgaccaagattgctccgatatcagcaatgatagggataattagttttgggctctttaacccgattggatgattcaattatcagttcggtgtaattatgtttcacatgaagaatcaggcaaccattaattggaaagataataacccaactacacaagatatcggggattattcggaattgcagataagggaaatgcaagcaaggaatgaaacgcccgaaagcaaaagtatataaatataccctattccgctagtcgttgacacgtctagtgaagagctttgtcgagaagtcctttatagaacatcgaaagatattactatctcagagatacaactataacaatctattaaggaatccaaaggctaagatagtttcaacttatatattttagcttacataaccatttatttatttcatttataagcgactaatttaattttatttactcaaatctgaatatggtgctctcactcagagaataataacaacgaaggtaatactaccaacaacaccaatgctaatgtcgcaaatgaaaacaatgaacaagttcaattagatttaacagcaactacctcagcagcaacaacttcaccagcttcaccagaagctccattaccagcaacaacttcaccagcttcaccagaagctccattaccagcaacaacttcaccagcttcaccagaagccccattaccagcaacaacttcaccagcttcatcagaagccacatcatcagcaactacatcatcagttactccagcagctacttcatcagttgctccagcaattactccatcagctccaacaattactccatcagctccagcaactacttcatcaattaattcagcaaccatcccagcaaccactccagcaaccactccagcaacttcttcagcaatcaattcaactgttactccagcagtcaccaatacaactgtcgtcacttcatcatcatcatcatcatcatcatcagcaacaactccaaaatcatcatcagcttcaacatcaaaatcatccactcctgctttagaaccaaacaacaagaaaactagaaccaagtctttaaagaagacccttaccaaacttggtaagattcctaaagcaaaaccaaccaaaaccaagagatctttacaagatgaggatggagatattattatggatgatgcagaacaaaactggagtaaaccagcatcatctgaaatcaacaaggttttcaaagaatttcttaaaacaaatcaatcattcgaaacactcaattcaaaagatgacttcaacagatggtggttcgacattaataacaattgttcaagaattggattcaacaacatcttaaacagaatggttgatgctactttagtcggtgtcaaattaggtatcaaagaagatcatgaagcagttattaaacaattatttgcaaaaactgttaaaattggtgagtttggtaaaaacacaaatgatcatgctcaaaccatgttacatgagattttaaatgcttgtggtttaattttggatgttcaggaatgtatgctaagaattagagaatacagattcaacttaactaatgatagattccaaactcttaatcaatgggaagagttatctttaattatgaagctttccaaatatgagatgcctaacaaacaactttgtgctcacttagctgttaattttgatattgattacaactgtcaagacattttggaaattattgaaaagttcattaatgaagaaaagaatgacattcctttagtcattgatgctgtttacaacaagttaaaatcattaaccaacattagatcaaaagataatgtcttgaaagaaattactagaagaagagtcaatggtatttcaattggaaatggcaatgtcaatggtaatggtaatggtaatggtaatgttaatggtattttcaatgctaattcaaatagaaacaacaatgtcagaaatgataccagaagatcttcagttagaaacaatgcaagaaataatggcagaagaacaaatatgagatcaaatggtggtaacaataatcaaatcaataacaacattaataacaattatcctgttaatggcaactcaaatgataatggtaatggtaataacaatggtggaagaaatgtaagaagaagaagaaatccaagacactgtgtcatttgtggtgctaatcatgatccaagggattgtgatagaagatatgatgttggttgttggaagtgtggtgattcaaatcattttatgaatagatgtcctgtcatcagtaatgaaagaaagaaattcaaagtcaatgctattttaaatgatgtagaagctagatctatcttggagatcatgatggcagagaaggagtccaatattaatgataaagacctcgaggttgcgaggcatcaaggctgaatctaactacacttctattgttttggatacaggtgctcagatctctgtcacaggagataaaacattattagatgattatgaagaaattgaaggtgattttcatactatacaatctgttactgaagatgaattggttattgaaggtggtggttatttgaatttaggattaattaatgatggtatcaagaaggttgtcagtgttccaatggtattttgtccaaatattaaaggtacttatgttagtgaaaaggatttaattaagttcaaggttgattataggtcaattgatggtgaaccgaatttgatttggcaagatggcaaggctcagttataccgtgttcaaggtacacctatgattccagatggcttactaataaagcatcaaaaagggaatgaggtagtcgcaggaatacatgaagcaggtggtcatgcagatattgacaccattaagaaaagtatggataataataatattgtattagataaagatgaaagaattctaaatgagaaattcacatgtatttcatgtgcaatggcaaaagctactagatgtaatcacgtcaaaggttcaagagataagtatatgatggagactcccttttatttagttcatagtgatctacttgttttgagtttcaagtattcaaaaggtggaagtgtggcaggttcagcgttacgttatatagtcacttttttgtgtaattatacaaaatttaatgtttgtttttacttaaaagataagtctgaagttgaaccttcattccgcaaatattgtgcctatataaagaataagtttaaggctgatatctcctattttcacaccgatatggggagagaataccaaagtaatagtctgaaagaatactacagaagtaatggtattactcacatcacaaccaatggttacgcatccatggagaatggtttagctgaaagatttaatagaaccattagaaacgacatgagaaccaatttggtagaatcaggtatagataatagattctggccagacgtaatggaatactcttcaatgattagaaataagttaattcctaagaataaagataaatctcctgaacaaatgataatggaacattatttccctggtacaggtagaaagcagttcatcccacatgtgtttaaaagttttggcagatatggaatctggctagatgcttctaagaaggtatcaggattagagatgcgtgcacatcactgtttttatcttggtccttcggagtatccatgtgcagatgaggcaccagttttaggtggtgataagatcctagtgtatgaaaaacttaaggatggattataccatgccacaataaaacacacaagaaatgtgaagtataataaacctgttaggttatttaaggagatttcattggaaaacttcggtatgaagagagctttagtaaaagaaactgaagtagatttcacagacaagtatggcaaaactatggcagaagcagaattgggcaaagaagaaattgattttccagtgttaccaaaatactatgtttatgaaactaataagataaacccagaattaagtacacctaaggacagtgagtgtgtcgtggtaggaaacaaagatcatatggtaccaaaagaagttacagttaaggaagcagacattccattgaatatggggggagatagtgtaactactgacatcaatgatagtggaaagaaaaatgacactagtgatgaagacgtagaaatgacagaagacaaagataataatattgttgaagaaaccaaagataaggatgacgacaatatcgaagcaagtgcaaagaataataaagaacaaacatctgatatcacccatattgtaaatgttgcagaaaatcctaccagaaacgagtctgacgagactatcattgataatgatatatccaacgaaatgtctggcagaactgaacttaatgatcaggaaaactccactacatcactagccaatgaagagacgacagaaaaggtcgatgacattgaagtagaacaatttaccaccgaagatttaaagcgcagagaagagttcgaacaatccgtcagagaggacgatttacataagacgcttgaattgaatgaaaacaatcttgttgaatatgaagtcgacagaaccctgcttgattcggacaaaccgcatgaaacaataaagctacctgaagggagattactccgtagcaagttttcaatgaagtccgtcaacggaatcatgaccgttgccaatatcagcaagttaccaagggaggacccgggcccaaatcgaatcatataccaagttgtttgtcatgatccagttgaaggacctgcctggagagcagcacacgatgacgaattagaatcccaaatgacaaaacattcttgggatgtagaacctattataactagtgacccttatatactacagagaactgtgagtatgcaaatagtatgctctgaaaagagacctgctgatatggggggagaagctaagaagaaggtgagatttgttatgagaggtgataaacaggataagtctacctataaagaaacttacagtccaaccttaccttatgacatgctaagaatgattatagcggagtcggtacaaagcaatagatacatagaaatggtagatatatcaacagcctatttgaacgcagagattgactgcgaagtatacgtcgagctacctaaacacctggaagaaagtaatgttaaattaaaccatggtgagaaggtggtgcatcgattaagaaaagcagtatatggactgaaacaatcaggattcttatggtataaaacattagttaagtttttgatatcaataggatttgaagaacgtggggatattccttgtgttctcgtcaaacctcaaaagaaaaggaaagacaagatatccatcatcgtgggatttttcgtcgatgacatgattgtttcaggcacatctcaaaatgaggttgataattttctatataagataaacaataggtttactttaagaaagacatatgctaataaattaggtttcaaagatattcttggtattggagtcagagaaaacagggataagagaagtggtactttactctcgatggaattaagtctggagagttatatcactaaattggtggagaatctaggaatgaaggaagaatttagctcccaaagattcatttctacaccaatgacacctggttttcattttgatctagaaaaggaagaaccaatggaattatctggtaaagaattagctgacgaaatccatttctttagagaagttgttggtgcattacagtacatatcattaacggtgagaccggatattacttatgcagccaactatatggctagatattgcttatgtccacatccaaaacttaaaagggaacttcttagaattgtcaggtatgtgtatcaaactcgtagttacatgattaggtatactcgatatctatcagatttggttcaggatacggatagactgatcacctactccgacgctgatcatgcgggagatccggtatcgaggaaatcgactttatctgctgtgttcatgatgaatggaggtccagttgcatggtttactagagtagctaaattcatggcaacatcatcaacggatgccgaggtggcggcaatggtagagagtggcaatggattgacccactaccgtgaagttttaacattcctgggagtacttggtcctgagtactctagaaaagaagaatattttatcccagagtatagtagagctacaaaagtggatggtgccgttaatatgaacgaataccgccgtcttcgaccattattagttatggttgataacactgctgctatatacttggcacaaaagggtactaccagtaatagatctaagcacatgggtattagggtggcccgtgcaagagacattatggaaaatgagcatattgtatacaaacatattggtacaaaggaaatgttagctgacattttgaccaagcctgtcactgctgaagtaatgaacaatatcttaccaaaaatcatggttactggaacatctaaagtgagacacatctagagctatatgcaatttaagaattatacccgtgactatgcacggaattactgattactgatattttgttaaaaccaagttagtttaagagcaattgtttattatcgattttgaattttactaaactgaaccactatcatatttgctgttattaagaggatgaaaggcattaatatattgattaacttattgtttactgttatattttatttattttattttgctttataatatattgtacgcgaactttgtttgcattatttgatttatatttgattttatatctgaatttaattttgttattcttacttacaatgtttctttctggcaatgttccaatccttacagcatttggtggtgtgttaagattaggtaatacaaagtcggttatgttctggaattgaggaaactactcgctacatggaaatcttgggattgacaaatgttgcggtacgcaatttatcgggattagttttccgtgataggaaagtgttatatggtcttatctctttccataagtttctatcgaactatgatcaattgttgggtgcatacatgaaacatgtttgaccaagattgctccgatatcagcaatgatagggataattagttttgggctctttaacccgattggatgattcaattatcagttcggtgtaattatgtttcacatgaagaatcaggcaaccattaattggaaagataataacccaactacacaagatatcggggattattcggaattgcagataagggaaatgcaagcaaggaatgaaacgcccgaaagcaaaagtatataaatataccctattccgctagtcgttgacacgtctagtgaagagctttgtcgagaagtcctttatagaacatcgaaagatattactatctcagagatacaactataacaatctattaaggaatccaaaggctaagatagtttcaacttatatattttagcttacataaccatttatttatttcatttataagcgactaatttaattttatttactcaaatctgaataaatagctttacatgaagaaaacgcgcttgtccttaaatagtaatgagagaggctcaattttttttcacttgaagtattattgtttaactttattattattaactaccacatgttgtttctcttttcactttggttgtattattattattatcgacactgtctctgggtttatattcacagtgtgctgcttatacacctactctctcacccctatatcactctttccgttcactatataatgagtacctctcttattggacacagtcgatcgactcccgaagtcgataataattttgcatgtgaaaatagtcaccctgttaatgataatggagacaataatgaagacaataatgaaaataatgataataatgacaccacaacaaccacaaagaaacacagaaatactctatctgaggaacaaaagaaaagtaaccatataagaagtgaaaacagacgacgagaattgatcagatcaactttcgataaattagttgaactcgtacctgatttagaaccaaaagagggtagatcagaattaattgttctaaacaaaacttctgactttattaaactattaagagaggaaaatattagattacgacggttaaaggatgaaaaaggtctttaaagtataatatatatatatatattttatttaattccatacattagtatttatagttgcattgtataacttaccatcatgaaccacattcacttgtttagattcttcattatcccaatcaaaataccttttctcaactttagctaatccttccttcccgttatttattaaaacttctccaacttttgatacatccctacgtggacgtgaagatgaggaagaagaactaggttttccaaatggattatatacaggtttttcttcttcctttgttttctcttcaacttcttcatttcccacaattgcttttaattctaatttctcatatgaatcattcaatccttttatctcttcattgaatattattggtaatacacgtctagttgctccattacctgtccatgtacgtatagttaattcttgtcctatataacaacctttatcataattaattccatgcatccaatctaaattacattcaaatggtaaaattgatgcattagcaaaatcaatagtttcgacaataccatatttaattcttctatttgtatagttttcatatggcaatatatccttttcagaaatattatgaattgggggaacattaccttcattcattaaaattctaataccaaaataatcatttctttgatcaattgctaaacctaaaattgaatttggatcaatatcaaaatcaaataaaactttattcttaataaacaattcacttaatgttttacttgatccaatatctttggaattggcatttgcaaaatattgatcaagtaatgaatcataaatttcattaccttcacttgaatcatcataataaaaccatgaatcgatattatttatttcacttatttcaacatttgcacgtaatttatgtaattttaacatcattaacaatggtttgaattgtgatttatttaaaatttcaattaagtaacttggaaattcatcattattacctaaaaatggtgttggataaatgaaaacatcactaaatatacgtccattagctcttaaaatattagaatatctaccatcacgtctaatacctaatctcattggtaattcatcttcattagttggatcaaattcttcattttcatgcaatatcccccaattactattattaattaaatcatttgataattgaattgaatttacaatattttcattattaatatcagcatttgaaatagttgtttgattcttctttaaatgttgtggcagtaatttaatagttgttaatccattaataaatattgatgcatccttacctgaaattttaaggaaatttgaattattttttaatgatataagaccctttgatggtaatgttgatggaattttagtaaaattaactttacatgtggagaaaagtcttatcgaagacaccagacttccaacacgtataccacttatcattctactggtgtttgtctccaaaagattaaatggaaagaaagaaaggaaaaacggttggttatatacaatgtccgaatcaaaatccgagaacctctaattattaatcaattctagcaaagtgttttaaaatgtatacaagagtattatatatggtgaagcttacatgtttacaaagtaaatatgatgagtgaactactcttcatcttcattatcttcttcctcttcatcttcatcttcatctatttcttcaacatcaccatttttagactgttggattctttcagttaagaaaacatttatttgatcttgcaaatcagtaacttgacctcttaatacacccattgggttcccaagattaagaggtgcaggtttatccttgtcaatgtattcaccattggttgattctaataaatatggagatggacctgtagttgtaccatcagaagataaatttgaaacatcttttgaaactgtgaattctttagtttctgtttcattattagtgtttgtatataaagctgtgggtcctgacattgttatctatatgttgtgatattctctcttctcttctatacttatagctatatacactctataacaaccagtaataagttgaagagcgggtaacaaattcaaatgattttttttccatttcgtcgattcatgaaaaattttaattttcaatgctttaagtatagtgacatttacattgaaggaggtagaaatctcttgaagtttcactgttacaactaagaaccaacaaagagaatgtcatttaccattgttgtagacaacgaccttcatttttcaatccttgaattggctgctattcttgatatggagttgaaatcagaggatcatcattataagtcaacatttcaacaacttcttgatgaaaataacaatgatgaaattattaatcaattaattaatgttcaatcattatttttaactaaattttcaagaaaatcttttgaaccttcaattaacacatatcttcatatagtttcattaattgattcagataatgaacataatttattatcaaatttaattaataatattgattcaactaaaaacaccgaaactgtaattccaaatgatgtaattttagtctcattaacaaatattttcaatttattatcagaaaattcagttataagatttaatgcattatcaactattgttaaaattattataaatgataatatttcaggtttaattcaaaatatatcaaaaaatatacaaaaatggttactccctattgattctcaaattgaaacttcattaaaatcacaattattaattcaaatatttactcaacattcaattgaaaatgaatttgaatctttcaatactttccaacaaattatacttgataacaaattatcattaacatccgaattctttgataaattcttttctacacttttaagttcaactcaaatttataaccttacatcattatctgaatcattcaaacaagtatcatcatcaacatcattatctaaattattaaatatttatttaatcggaaattatgatgaatttatatcaaataaatcagaatttgaaagtttatcaattagtttagaaaatttagaatctaatttattaactttaactatattaaattatttagcaaaatcatcaacaaacactttatcatatactactatttcaaatgatcttaaaatttcaatagatacaattgaattaaaattatttgatttaatttcacaaaatttaattaatggtaaattatcacaatcaactaattcaattattgttaattcaattaattttactggtccttcattatctgcaaataaagaattggttaattggtcagaaattaatgaattactttcaaattggaataataatattaataatttacaatcaattgtacaatcattaattcaaaaacgtggaaaaagagttaatgctcctgatgtaattatgaatttccataaacaaaaattagatgcaaaggaagcaagagaaaagaaagctttacaacaagataatgttgatgaatcttcaaatactgaaattgaaactgaaattgaagcttaaattagttttcaaatattctttatataatgtctaaaattttttaaactaataatcgaaattaaataaaactgtagatgtatataagtatacatggagtgtaaaagtagtgtgtctttgcatattaatggagtattttctgttttatcttagtatttaaatccttatccagctatccttttgataaaaccgccgtatttattgactttccaatcaactgtctaacatcgaaaaaccttttctttcaatttgaagctaaaactaaataaatcttgtttaaacaattatcaaacatactaaacatattattgaccacttaaatacactaaaataaacaccataaacacacttttaaatgctaattttttttttttttttttacattaatttcattaaaatatacaattttatacagattgattacttatacgcatatattattaatgcttcatcaattcaatatatcttcatatactgaactaaatgtaaattatttctgtttgattattctcaatctttttcatctgatttagatctaataagaactaaatttttcatatttgaatagcaaatatgtatctttaatatatctttttgttatcctaaactctggatcattcttattgcttttgtagcattgtttgttaaaaaatataattaacttgattattatatttgctttataagcatctttctttgttgatattaaaccaacaatattttttagatcaatttttatttctaattcttttagaattatttcaattcctttacagttgaaaaagacatgatgagtcccaccttccccttcgcagaattggcaagggtgataaaaatgggaattcaacattcctgtttgtaattcaaataattcattaaaatcaacatggttttgattggtgattctacccaaccaaccaaagcatgtttcccaatccagttgatggtctagtttaccatcccaataatcagcattaaatttatttttaaattcttctttgtaaaatcttttagaaaagtgtttaaatgattcaacattgatttcctgatttttattgaaaatttctacaattttccatttttgaacatttttttctaccattgaaaataacgatgttgcattgaaatctgtagtttctttaacctgaaaatctgagtgaatattagttaaataataccatccttgtaaatatgggaaaatattagagtacaccattaatggtgctaatgtttttgaagaagcttcatccatgttgtaaaattctaggtcacgtgaacaaacaattatgggtcacttttcaaaacaactttttttattaacactccacatagcgtaatggtgatcgcgtctgactacggatcagaagattctaggttcgagtcctagtgtggaggttaaatccattatttttttcagttttgttcacttttctctattattattgttattatagttaccaaacagtgttttcctttaaatccgtccctcctaagtttcccacgactacagttttattttttccattgggaaaggaaaggggaaaaaagatatctccggccgccaagccacaactaaattgacagattttaaaatacggacgtaagttcctaattgggaagtaagtcccacaatatttttaaattttccgttcctacagtgccaactcagttaattttcaattaataatttgtcatcttttcctcactatagggtttattacataattatcggcaatttgatttttctaaattttcggagataattattttttctcatggaaaaattttaccgccgtactgaatcgacaacaatggaatgaatttatttttgtcaatgtttacaaatcaattatatcatagcaatggacatgtatataagtcaaaggtatcccagggccagggtgtactaatataccattccatttgcatcactccaactttttcagttttaatttgaaacccagtgttacttacgttaatttgctatgacagaccaaatcgattcgagttcattgaatcgtgatgattcaactgttcctgaggaaatgaaatttactggtaattatgatgatttaaataaaacaattaatcgttcagttactcaagatattgataataatgttatgactagattatctactttatctaaaactttatctcatatgaatgcaaatcaaatggaacttttccaattagatgaaaaagattttgacttggctaatcttttacaatatttagttaattttaatcgtgaaaaaggttatactatgaatgaaattgatgttgttttcaaagatttaacagttattggtaaaaatactgcagcttcagttttaaaagatgtatctgatgtttttttcaaacctgcttcagttatttataataaaattcaagaaagaaaaaatccaagttcatataatttaaatgatttaccaaaaacaagaaaaattattagaaatgttacaggttttgccgctcctgggacaatgacattagttttaggtagaccaggtgcaggttgttcaacttttttgaaaactattgcaggtgaaactcaaacttatcaaggtgttgaaggtgtattaaattataatggtattgatcatgaaaaaatgtcaaaagctttgaataatcttttagtctataatccagaattagatgatcatttcccattcttaactgttgaacaaaccttaaaatttgcaatttcttgtaaaactccaacaattagatatgataatagttcaagagatgaatatattgagaatatgaaaaatttatatgaaatcttatttggtttaaaacatgttgaaaaaactttagttggtaatgattttgttagaggtatctctggtggtcaaagaaagagagtttctattgctgaagcaatggttacatcaggtaatgtttattgttatgataatgcaactagaggtttagattcatcaactgctttggaatttgctgaagctttaagaacttcaactaatatttacaaaacttcatcaattgttactatttatcaagcttctgaaaatatttatgaattatttgattatgttactgtcttataccttggtagacaaatttattttggtccaattgataaagctgtctcatattttgaaaacttgggtttcttgaaaaatcctcgtgaaactagttcagaatttttaaccgttgttactgatccatctgctagaagaatcaatccaaattttgaaaataaaaagagtattccacagactgctgatgattttgaatttgcttggagaagttcacctgaatttgctgaattagaaaatcaaattaatgaaaaattattaatgaaaaaagatcctgataatcaactaattgaattgagaaataatcataactcaatcaaacaaaaatatacatctcaaaaatctctttatactgtttcttatcttacccaattgaataattgttgcagaagaagatttcaaactgttcttaacaatcgtgcataccctttaactttaatttttgctgctactgttcaatcattagtcgttggttccttattatataatactacatatgaaactgttggtgcattctcaagaggtggtattattttcttttcatgtttatattttgcaattatggcattagctgaaactcctgctttgtttttggataaaccaatcttaaataagcaatatggttataaactgtatcatccatcagctgaattacttgcaaaacaattagttcaatttcctgtcaaatttcttgccattacatttttttgcatcattctctactttttatcaaatttgaaaagagaagctggtgcattctttcaatactttttatttgtcaatttgatcgttcaaactgttagttctctatttgttatgctttcatctattatgcctaatgcttctgctgctatgggtatttgtggtattacaatgatgtcaatggttatttattcttcatatatgattcaacgtccttcgatgtattggtggttcaaatggttctcatattgtaatcctgttttatatgcttttgaagctatggttttaatgcaatttaatcatttaaagatgccatgttctccatttgaattaattcctaatggtccaaattattctaatattgatactaaactaaatcaagtttgtggatttgttggtgctgcagcttctaaaactctttataatggagaaaatgctgttaatggtaatatttatttagaattagctttcacttatacttacaatcatgtttggagaaatcttggtattttgtttgcttttattgttggttatattgctatttcttgtgttattgttgaaaatttcaatcctataatttcatcatcagataaattggttttcattaaaaatgctagaattactaaaaaaatgtttgatcatttccgtttaattgcatctgatgatagtgctgaaattgaagttgatttagaaaaacatgaagatgatatcagtgctactgcagaatctataaacagctcggactctgataatcacaagttaggttctgaagatatttttacttggaggaatgttaattatgttgttccttatgatggtgctgatagaaaattattagatgatgttcaaggttatgttaaacctggtactttaacagcattaatgggtgaatctggtgctggtaaaactactttattaaatgttttatctaggcgtactgatgttggtgttattacaggtgatatgcttattaatggtaaagaaatgggaaattcatttgaaagaagaaccggttatgttcaacaacaagatgttcatatagctgaacttactgttaaggaatcattgttatttagtgctaggttaagaagaccaagaagtgttcctgatgaagagaaagttgaatatgttgatatggtcatgagaattttggatatggaagattatgcagattcaattgccggtagttctggttatggtttgaatgttgaacaaagaaagaaattatcaattgctacagaattagttgctaaaccttcattattattattcttagatgaaccaacttcgggtttagattctcaatcttcatgggcgattgttcaagttttaaaagatttagctaaagctggtcaagcaattttatgtacaattcatcaaccttctgcaacattatttgaacaattcgatagattattattattaaagaaaggtggtcaaactgtttattttggtgatattggtactgattcaagaactgtaattgattattttgaaaatcatggtggtagagtttgtgataaaagtgaaaatccagctgaatatattttagaagttattggtgctggtgcaactgcttcggtcagtgaggattggtttgatgtttggcaaaatagtgatgaatatatcaaagtatcaagagaaattgatgaacttcttgaattaggtgtaagtcgtgaagatatgacagatgaagaacttgaaacaaaatatgctacaccttatagttatcagttatatgaagttttaaatagaacatttgttcaaaattatagatcattaccttatattatgccaaagttctcattaacattacttgcaggtttattagttggtttttcattttgggatgcaaagcacacagtcattggtatgcaaaatgttatgtttgccaatttcttatctattattgttagtgcacctttgatgaatcaaattcaaactaaagcaattacatcaagagaattatttgaagttcgtgaaagtaaatcaaatacattccattggtcttgtttattattatctcaatatcttaatgaaattccttattcaattgtattctctacaatttattttatttgttggtatttcccaattcaagctgattattctgctccttatgctggtttctggtggtttacttactgtttctttttccaattattttatccctcatttgccttaatggttttatatgctgctcctgatttgccaagtgctaatattttattaggtttacttttcagtttttgtattagtttttgtggtgttattcaaagaccaacattgatgcctggcttttggaaatttatgtggagattatcaccattaacatatttcattggtaatcaattaggtgttacattacatgatagaaaagttacttgtagtgaaactgaatataattatttagaacctccaagtggattaacatgtggtgaatatttagatagttattttgatgataatactggttatgttaataatccaaatggtacaagtaattgtgcagtttgtcaatattcagtaggtgatgagtttttgaatagtgttggaattcattatgatgatagatggagaaatattggtttcttctgtgcatatatttgttttaatttatttttaatgttaggtggttattatactttcagaattcaaagaatgtctcctaaaaaactaattacttctcttgtatcaacaattactggtaaaaataagaaataatcatcattcaatttagttagttatatagttcattaattattatattagttattttattccataaatttgtatttagaagtgtttaataatatagttttttttatttattgtaaaacttgtttttttttcaatcattgtttcaagcagtacgataaatgattcaacagaaaaagtttttacttcagtcagaagattaaatctatacaatttttaaagaattaaaataattaaaggaagaaagttaataaataatttagttaccagtttttctccaatgttcaagagtgtcaatgatagctttggaaactacagagtatgcgtagtcaagatcttgtttagtatgagtagcattgatatggagaattagttctggaactataggaagtacttcatgatgtaatattcttttagttctggttggtaaaacttttgcttcaacacacttattaataatagtttgtagtttgaaagactccaagttataatattgatcaaagaaaagctcttcattaccattttttaaagcttttgtaacagcagaacctggaccgccataaacatcaggtaaatctaaagcctcacgtaaatctgcatcaattcttaaatgtaatgaaggtgaatagctatcagatttaacagtaacatattttgataattcctttgagttgttgaaaagagaatgtaaatatgcactattttccttcagaggtctgatatgagggttaactttaccttcaacttcttcatcaataattgcctttataatagttgaaactgcaactgcacaataaggtggtaatgcagcagagaaaacatatgcattagaagttaaaatttgatgatatatcatatctttatcaccagcacagaaaccaccacttgaaccaaaagaacgagccatactaccaatagtaatctctatttcacttcttgggatattataaacttcaggtaaacctctaccattatcaccaagagtacctatggaatttgattcatctaaaattaatctgaatttatatttattcttgatttcaactaatcttttcaaatctggtgaatcaccaaaattttctgataaaccttcagtgacaataaatcttctattaagtggaccttgttctaaatcttttgataaattttccaaaattgattctaaatcatctaaatcattatgattaaaccattctatattacatcttgaaatcattgcagctttttgtaatccaacatatgcaccaccatcaacaatcactatatcacctcttttcaaaaagcatggtaaaactgatattggagttgcaaaatcttgaccatacataatacagtcttctgcacctaagaacattgcaagatcttctctacatctgacatgaacactttgagtaccataaaaatttggaggaccacatgcaccaacaccgacttctcttatacattcaactgagttttccactactttcttatcagtactcataccaaggaaatctaatgaagcaaaattaagaacatcagtactaattgaatcaccttgttgaatatcaactcttttagaaacagcgccgttaattataggattagtttcaatttgccatttttcatcttccctaagatcaacgacaactggttctggtacccaatcttcaatcaattcatcagtttcctttttggataaaaccatattatctttatcatcttgagaatatcttgatgcaagaaaatattttatggcaaataatgctaataaagcttctaataaagttctccaaggatcattcttatgagatgccttaatataattgatgatcagttcaccacctggtaattgcatcaaaatttcaactaaatcataccaaatatcattggccttataagcaagtccaacaagaaaattggaagattctttattgtcgattaatgatgtaggcatggtttatcgatactatttcaaaagagaaaacttcaaggcaatcctttaaaccaaacacaaacagccaaaataatataaacatgcaccaccaaagaaaaacaacaaattcaatgagagagcgccaggttttttccctcttcgcttcctaaatagtgttaactccgttcaaaggttacttgtttatatccggtgtattatgtaatcgttttctatttctatttctatttctatttcttattattatcttttacattatatttatattacaaaactatatactaatagatcattcatttgaggtgaacatttctattttataggtgaaagttacctttattccaaatctgctaaatgatccagaagatctctttcaaattcatcgaaggaatcagattctgaatctgcatcgtcttctttggtgacagttttctgcttcttattggcttcttcttcattatcaatatcttctctatcatgttttaatgatccatttgcatttccatcctctatattatcctcttcatcatctttatgatcttcatcgtcatcatcttcatcatcttcataatctgatcccataaactctttcatttcatcatcaatctctccccaatcaattgcgcctgaattacttggtgtgatagaattcataaactcttgtacttgagatttactcaataaatgttcaacttcaagtgtatatggttcctctgaaattctatcccatagtgacatacatgcaaatacccaatctgggttaacaactttaacatttgcatcaacacttttagctaatcgtactttaaatgtacctggatttttgcatataacatgcgttacttcaggtgtataattctccacaaatcttgcaccaaatgatttagcccaaatgacgatatcagcattttgaattttagttccaagtggtaaaacactacttaataaaaacacacagttttggaatactattgatttcatttcaatcattatatctttaacatcagggtttgatttcttatattctttttcattttgttcgatttcaaagtaatattcattatgaattctaactaaagcttggcctaaatattccaattctctatcatcatcatataataaattatgtgtttccttttctaatttaccttctgaattcagactttttaccattattagataatttcttatcagttacaatatcaacttcttcttgttctatgatcttctctaaattttgttgtaacttagccaaaggtctatcatgttcttgttgctctaaggtgttggttctctcagtttcttgaaccgctaaaagagtattgttatcttctccattatttaattcaattaatctttcaacaggagatgatgatgtttcatttatggtaggctcaataagattattttcctctgtaatactactatgcttattgtcctcaacgtcagctttctcatcttcatcttcattcatcttcatcttcatcttcatcctcctctgctatagcttcttctgaattactttttaagctttgttcatgtaatatttttttctcttctgaatttattaattgtttcctctaatttattaacagactttcgtctcttagaaggaccaagtaatgattgttgacgaggtaaaaaacttgaattaatatctccaatacctaaaaagaaatcatatggaacaactttaattaaattaggtgaccagttccaaacatcacctctatcatcgataacaacaaccattgatgtgtcaacaggaaacaatcttttcaaagatttttgagttaatgaaccactttcatctcttgataaaattctatcaccaaaataaattctatcaggatcaataattttggcaatttcttcagcatattgacgtgttgccattgtataaatatgcatttcatatctttcattcattttacttaaaaactctgctagtcctggtcttaatttaacataataccatctcttagttggtggaattggaggtccattataaccaaaaggaatgaaaggtggttcttcaagaataaatgatttaacatctttaacagcattataatttggattattaggatcagacatccattcatcaacagttggatcaacggtaacatgaataactgtttgatctaaatctacaactaatgagagttttttctcatttaataaacgatcagttgaagaacgttcaattttttcagcttcctttgaagaaacttttaaatctgttgatccatgagccattgatataggtgtacgtttattcatttcctcttcttctatagatttaccacaaactgcacatagtcctccatattgtaattggatgagaacatgattcaattatatcaaatataggcttactgttatcagtaatttcatcccctaccttaggtgtaaattttacgaatcttaccatcaaacccagattcataagttccaacattttcaacttttttaacttgtctttcactctcatctggatgttcatcgtcaatttcactgattggaattggttcataatcataatatttgtatgttaaaattgtggtatgtttctgtacttgtctgttcttcctttacatgtatctttaaaacagtgaattggatataataaattctttggtaaaaaggcagtcgttatatcaccatcattgttcgacattgcagatgatgacaactgataaagaatcaaagataaagataaagataaatataaaattagaaaagcatatcaagaataaaaaacaacttaaacaatttttacaaaaaaacgttctcatcaaatttcatggagcccataaaccttgtttgttttattgacacttttgagacatataacagcgcccgtaactgtattctgtataagatgtttagttattttaatgaaattatattaaaaaaaaatacggacatgtttaaggtatgcaattactatatcgatagtgtgcttgtagatgcttattattcttatatttctaaagttataagtattacacaaaataatttcatacatctactacttattatacactaatcttcaaacatgtccatatcaatatcttcttcatccatctcttcaaccatttcctcagcaacttctccagcagtttcaacagctacatcttctcccactatttccacagctgttcctactcgtatctcctcattttgaattttaggttcttcagaatccatcgtttgtaacgcatttgtctctgctacgtctaatgattcatcaatcccactatgtggacgtttttctgcaacttttctgaatggttcggtttctctatctgcatcattcaaatcctttgcatcatttgtatcatttgtatccgtaatcattgggacatttgaattctctatattttcaataggagtttcacttagttcattagcagatacatcattaactgttgtagtattgtcaactaaattagtctcctcagctgagaattctatcatccgtagttgcaaaaacatcatcctcaaatctaacagttaatcctttagtttcatttttattctcttcttctccgacatttgaatcttggaaatcttccatatcgctgaattcaacatcaaattccacttcttcatcaatattcccaaaaatattatcattgttattatcattaccactacccattccaatttgaatttcattagcttcagtatattcacttttctcagctgcaactttcttacgtttctcctcttgttctaataaccatttagcatgaagtttttcttgcttctgtaaattcttaaccaaagaatgtaatttcttatcacgataatcatttaattctttattaatatcatcaggtaattttttaagattagagtaaaatccaaatattttaccaaagtgactttcatcagatttaactctcttacgtattctttcctcttcctcttttcttctcttatccaataatttggttctttgtttagctaactccacaagatcaaatttattctcagagttagtaggtgcactaagttcagcagcagaagtagtttcttcaatttcagatggaggttgtttcttttcattgtcttcaactttactttcttcaaccttttcttctttctcatctttcttctctttagtttcaccataattttcttcttcatcactattcatatcaatatcatcatcattatcagaattactactatcagaaaattcgattttaatagatttatcctctctactcattatatgatttaaagctttctctccaagtctaccctcattaactgatttttccctcaaaacagttgggttagttattctattattatatttaggtgttgatttaaatgtataatcaggtggtaatggtggcatccaatctggaatatatattttacgtttcttccttcgaataaattgatcaatccaccaagtttcctgtgttttaacaccatcataatcatcatttaaaggattgaatcctccatcatcagttccattatatgcagataatgatagtaatgctttcttttgtatattttgtatattctctttattaataattggggatctggataattcatacatttcattcaatccagttaaattaaaataaccttctcttaataataaattaaaatcatccttatttgggattttccttctctgtatctctgtcagtcttttcagtctatgagaaatgagtctaatgaattgacttgtaaaatcagttaataattctaatgaatcattagttatagtgaaatcttccttttctagagatgaagttattccgtatacttgcattcaattgtttccaatacaggagagttcaagaatatttgacattggttgttcattagttgttgaagttgaagtgataactgatgttggatcatggtacgccgtacttcatcaattcttcattaacatatttctctctcaattctttctctgataaaggttcagtgtttgtaatttcctcctctaatggacgtttgttgttcattatattatcgatatctgaacaactctttattgaactataatccaatggacctactgccctttcaagtttagattttagcagagtttctaaaatctcatcaggaatatttttaagcggtatcgtctgtgttggtggatccgacttatctggcatcttataatattatatgattaattgacacaataatccagattgtgtcttgatttcgttgttaatagtatcaaattgatataaaatgtatgcaatgttgatgacaaaattggaggttttgaaaatttcatgctgtgttgtgtttttttaaagacccgcacattataagaagggctgatttactgaatgaatgttatatagagctgtagttatctgagtttaaattaagtatcatgagagactatttacataattaataatatatatatattttacacacaatatatattaatatattttagtttggtaataaaggttagtgaattgtaataataaattttattaaaattacatttgaggagcaccagcaattggattaccagttttgatcaaccataccattttgcatcatcataatttcttcattaccagcagtttcaagttgaataccacaacctaatttagaagtatttttgaattgattaattgaaccattgaaaactaaaccaatagttggtaaaattctatgttcaagcatgaaagatacatcaccatttgattctaattgacctctgtaaatagcttgtctaaattcatatttagcacctaaaacagtatttgcttcaacggtagtttgaatagttggcatcatcatttgttcagacataacaggttgttgagcaatttgaattgtagtttctaaacctgcttcaagatttggagcaacttttctccagaatgaaccaatgaaagcaccttgagcttgtaattgagcagaagcaatccaatcacctgaattatatctacctgctaaagaaattgcagcttgagctggaccatttggatccattgcattataaacagtttccataccaattgataatttagaagtaattgattgtaaaatagaaccaattaataaaccattatatttaggaccagtaaaatctggattaagagcttttaattgaattgagaaatcatttgcttgatattcatgttctaattgacacattgaaggttgaccttgagctaattgtaaagaaattttagaagtaatatgtttatcccaagaataatttaatctaccagttaatgaaaattcattatcaatagtaccttgaactaaagcttgatcattagcaataattgaagtaaatgaataagcaggtaatttactaccaactgcaaaactatgagcaatttggaaaactggattcattgcaaaagttttattaatatcagcctttaaaccagtaaattgataaagacttaagaaaacatctttagagacttctttattaatattttccataatacctggattaactaaatctaatgattgtctatgttgagagattgtttgagatactgatgaaagaaattgagagacaggattagttgaccaaaatcctggttctgcagcagtagcaataggataaacaccctgaagaggggataatgatttcatatcaccgatattaacattagatgcagccatggttgtatgtcttataggaagagtcttaatgattatataccaatcaatcaagaatttcccactctaagggaaggaacaactcctcgtcgagaatgggagaaaatttcaaattttattagtaattttactgtgtacgggtttttatatactgtgtgtttaatggatatattataagctcttttactgggtaagatggtctcttatttgactgctgatactgtttaaacaactctccttcacttcaatgttcacttgtaacttatccgtgtctgggaatgaacttttcatactggaaagtccattttccacttgattacgtatctcttgtaatttattaagtcttaatcgtattctaccacatgcattatctgcatccttaactggtaaatcaccaactttaatctgttcaataatatcaagtaataatggtactatttctaaatttatattagacatttcatttatttgtttatccatttcttctaatttctcatctcgtattctctcattgagtatcttcttatcctccttagatttagtctcttccttgtttccatcatcatcatcatcaatgtccattaaatcgtcattctcgagtacttgatcaatattgtttgtaatgtgagaattgggcacaggtaaattactattgggagattttgataatgatttagatttagacttggatttggattttgatttactttcagattgtaaattcaactcagatactttaccattggcagcagatggtgatgctgatgttgatctctcaactgtgttgtccattgttcttaactaagtatataatcaagccaataataaaaattgaaaaaaaataacgcaggacttatagtgaggaatataaaaggagaggtattttgctgtttttactacacttgttctttccaattggtattacttctttttttttactttcttttgtttccttgcttttggcaagttgttagcggttggaatgggttactttacactctagagtcgtctattctcttatccgcactgcttcacgttacacattagatacaagcaatggatactcctcatctacagatcattatcagtttggaaatttatcaatatggaaatgacataagaatgataaaggatgatataaggcatttcaactaggaataaagagttcagaaatcattataggctaagaagattcttaaacttggatagacatctttcttttcaacggtgtctacccttaattgtttggcgagtagttccattaattttcaaccttctcccataaacatttcgaatacctcgaagataccagtgtaattccagcactcacaagcaattgcatcaaccaacttagcgaatttaactctggctttaacaggaactaggtctctatccacatcaatttcatcatacttcatcctttcctcaccaaacattttataagaacttttcttgaatagtgcatcataatacctattgaatgccctactaccagcgaattctaaaacctttgtttcagcagctttaatccacttagcataattggatttacctttcacataaatcgttcatactctttgccactttcacgttggaaaaatgtatccgctttttcaatctggtccttcagatgtttataagcatcaattaaccaatcattcttttcatcaacaacagcttgagttagatttgttctgattttatcaataccacaaatagtatcaactgtgagcgtattcataccacttccagcttcttgatctttggagtcatcaacatcaacatccttatctgataaaacctcaggtttaggaaaaggaggattaaccgactcaccaatgattctttcaacctctctaacatcatcaaataattcttcttctaatatcaaatgatctggtgtacccatcttttttctttcttgatattgttttaaacttattgttttagtattttttaaacttgtgtataactatctggctaatttcaatcaaagagtttctaataattgctctttgactctgaatctataataacagtaatctaataaggacgatcgactttctattatttggtagttgaagaagtgatagcttactttctatatattcttcggtgtatatctacttgtataatatctttgtaatataagttgtatacatatcacttatatatattcaaccttcatttatgtatgcttaagtttcaagttaaaaacttatcattaaaacaaattactacatagcaggatgcttctttttaatgcttttttttaaaaactataaatattacaagcttggaaaatacaaaacgaaaatcaaaatcaaaagttaaagttattaaaacgatcaaacataaacaaaaacgaaaacacacaaaaaccaaccccaaaacctaaacccaataatataaaacattctgaaaaatctatgcagtttccattaataaattatatttgtgtttcttaaactcctttgcttctttttgagcatcaccactatctctattttgtctcttatttttatgtttaatgaaacaatgtctaaaataagaaatcagacaattattcagattatttgccttaatatcaacactaagacgaattggagtaacacattgagtacaaactgcaacataaccttttgaagttttaccgaaaattggaattgacatttcattacctgtagtataaacaccatgatctttacaaacatgatgcatatatgatgaatctgcaactgtatggaaaatacaattcaaatccataccatcagtatacggacaataaggacataaattttgtttatcaatcttggtaccaagttcattcactctatatctgaaaacaaaagtttgataaaagttttgcttttgaccacaccatctcagtgaaatttgatcatcaggttcacgttgttcaccttgttcataaatccaaccatcaacatcttcgtattttgcaaattctttaacggtaagataatttggcagtaatgaagcaacaacttttctgtgtaataatgatttatcaatagtgataccattaagatatttcagaactttttcttctttactaactgcaaattgaaattgtgggtttctaccaataattttccagtaactatctgcctctagcaaatgaaagttgagtaaaaattggcataattcttttggctgatgtttttgtaggttttaaattctttgcaaattgagctaaaaattctggattttcaccaataacactagcaaagaaagaagcaggtgtttctgtttgtgtaacagtatttgtagtggctgtaagatcagagaaattaaccgtagtgactaaagcacttggatcaacagtagtatcagaaatttcagatgatggttctgagttattgatttcttcaatgttgccaatgaattgattgctctcattaatatcagccataattctgtgaagttcttgatcggaattattcaaatagttttcaaactcatgggtagctgctaactcaatgacattatcttcttcaacaacagctggttcttcaacttgtgaaccaaataaaaagttaacagtatcttgttgtgtttgatcaaattggtgaacattaaaaaacgaggttggttcgttagtatcaacatcattcatatctgttgaaaaagtatcacactggtcatttgagatatcatctgatgggttaaacacaataaactcatctgtttcacttgaactaaagacatataaaactggatctgtagtaatatcttctccaacaactgcttctggagcagtttcagtttcagctgtagtttcaacggctaaatcagtagtactattttcttctggatttgcttccagatcataaagcacatcgtgaaattctgactcatcgttgattaaattattgtttgaagaaacttctggtaataaaaggttgttggattcaataattggagtgaatgtggtatattgaggtgttgaaggttcaaataaagattcaattgatgtatcatcaataatataatcagaaatattgaaagacattttgggagtataacaaaaaaaattcaagcaaatgaaaataaatagtaaactaaaacttagttcaaaaaagcaaaagcaaaagcaaaagcaaaagcaaaagcaaaagcaaaagcaaaagcaaaagcaaaagcaaaagcaaaagcaaaagcaaaaactgtaaacgctaatataacagtggagtaaactctaactggtaaaagaagaaagtcaaacgattaattgcaataaaagtaaagaacatggctctttttatagtatttctgtactaacaaaagctttaataattgatctttgaaaaattggtttgaatttgttagtaaaaatgagttattttgtaaaatatcagcttcgcttactgaacaagtagaaaaaagttgcctattcgggtaattgatcattctttttgtcatgtcttctgtaattttgggtaatttttctgccaagtcaccctatttctattcacagaatagctgcttaagtatggtaatatgtacaacatgcataattaattgatttgaaaaggtcacaacagtacagagatttctctttagtatgagattttttttttcagttctaaattttctgccttttccgtgattccaaacgcttccatgcacgtaaaagatgcatcaaaggctagaagaataaatggatctttaaaataaacaaacaaatagataatgtattctgtgattcaaaacaaccaagaaagctctcaagagagagaaaactcatacttttccaaaaaaaatcaatgagaattgtaaatagtaaaaaaatgataaacagcaagtattaactaaatatatgaatgaattgaaaaaacaagtaatgaataaaaaaatttataataaaataaaagtatcagttgattacagagttttagctatgaaaacattgatattatataatttctgagcataaaaaaactactagggcaaataaaatttgtctcacattaaaaagccttaattttttttacccttgtacctttgaataaatataccggtgatggttttaataaattaaactaaaatcagaaaagtgaaaattcttcaatttgaactaaaaaacttcaaatttttttttggcatttaaactttaatttttaaacaaagatatttttcaagcatatttgagcctccataaaaaattttaaatcgttttaactaatggctcatgagatactacacaaattttttttttttttacattaatttcattaaaatatacaattttatacagattgattacttatacgcatatattattaatgcttcatcaattcaatatatcttcatatactgaactaaatgtaaattatttctgtttgattattctcaatctttttcatctaatttagatctaataagaactaaatttttcatatttgaatagcaaatatgtatctttaatatatctttttgttatcctaaactctggatcattcttattgcttttgtagcattgtttgttaaaaaatataattaacttgattattatatttgctttataagcatctttctttgttgatattaaaccaacaatattttttagatcaatttttatttctaattcttttagaattatttcaattcctttacagttgaaaaagacatgatgagtcccaccttccccttcgcagaattggcaagggtgataaaaatgggaattcaacattcctgtttgtaattcaaataattcattaaaatcaacatggttttgattggtgattctacccaaccaaccaaagcatgtttcccaatccagttgatggtctagtttaccatcccaataatcagcattaaatttatttttaaattcttctttgtaaaatcttttagaaaagtgtttaaatgattcaacattgatttcctgatttttattgaaaatttctacaattttccatttttgaacatttttttctaccattgaaaataacgatgttgccaaaaaattttttattgaaaaattagattttattttttaccacattcgacttggagcataacaacccctctgtagctcagttggaagagcgcgagactgtaataggcttaaacagcatacaagacatcttgaggtcgctggttcgatcccggccggagggaacacattatattaataaatttcagctttggtggcccagctggttaaggcgtcagtctcataatctgaagatcgcgagttcgaatctcgcctagagcatagttgaaaatattagtataatgtttacttttttgtttttgttattcattggggaattatgataagaacaaactcttaatattttttttttaaatgaaagaactcatatgattgacaattagtaggtagtattagtattagtatacagtgtttataaaagtaaaaagcagtagccagcacagcttttgtagcataattttttttcgtttttatgaaaagcatgattattctttgttttttatcatcaaagaaagatctgatttatatctatccagtacattcattgatattggacgttttaaatcataagatttaaaagataatgagtatctattagttagggtattttcgttattcttgttattattattgaagttgtcattgttgttattgtttattagaaataattcagatattgaatcatcatcatctgaatctatgagaacttttgacatgtcatgtaaagttaaatctgcatctagatcaggatcaatttcttgatcaaaattaatttcaacattaagtttggaatttaaatcaacatcaatatcaatatcggagtttgagtctatagatagtcccacaaggttcaaatcatcatcaagatcggggtctatatctgaatttatttccttatcattaaataatgaagtaattggtgaggttgtatatttttgtaatattgaagaattgtttgaagtatttgaagaagaatttggtcgtacgggagttggatgatgtaattcaatttcagcaaatgaattaaatggtgattgaacattataattatcaattaaattgatttctaatattgcaattgaatcaataattgattgaaatttatcaatagtacttaaactttcagtatttaatgataatttccaatatcgtattggatttttcaatggtataataaaagtatttatattaattttaataaatttacaattttgtaaaattggatgaattaatgaaccacatttaaagtaattcaatgaagaattaattgtataaatttcgaatttacctctcgatattagacttgaagaagaatcttgtagtttaataactgaatgaattgatgatgttatattcaactcctttgaattattataaattgccatttcagattcatccagtgaaaacagtgtttcatgtgattgttgttgctgttgctgttgctgttgctgttgttgattttgttttgtattatttcgtataaagcgtcgaaatggatttcgacttgttcgtattgatccaacatttggggtatccttcatattgtttaaagtattgttgactttagtttaaaacagtcaatttaattacactataataattatttttaaaagtaaactaaactaaactctatttctatttcccaatggatttctatagggtcggaaaattcgctgatttttattttttctcccactgttaataattttccactacaaattctacttcttttacttgtataagtgaccgattgagtgaatcgagtattattacaagagaatatgagagaattgacaactagagagacatttaataatggatctgatgatgatgaatatatggaagctaacgaaaccgccgagattatacgagaaattgatgaattagagcaagaaaaagaagttgctcttgagaaggaacagcaacaacgagaaaaggatacctttcccaatatattaggacgtaaacttggactgacaagaacacaccaactactcagacaacaaacactatcatcactgtcctttcttaagtttaaaaaagacaataatgctaggatacagcaacatgatcataataaaatggagactgagcctccgctattaagtacttcattttccaattccaattccaattccaatttcaattcaaattctaatactgcaccgccactgattccacaacaatttcagcagttacctcacacgccacattaccagccaccccaccatcatcaatattggcaattaaccactgcaccgccacatcaaaaggatatcgctgataattatttttctcaccacagtaagtaagtaagcgagccttaaagagcaattatcataattaagaaaaacggcggagattgcccagggtccgagatgacttcactatccgataatccgatttctttgcgggggttgaaagacctgttcatcttttgtacattttatttccctttatttctatttgatggttatcagtggcaagtgttataaaaggggcaatgaatactacctataaccatcattattgttattaatcattgattgttaattggttgttatattatttccatttttcacttatcagaacaaaatgacaacatttcaatatcaaaatcaattagaaaaattaccaatacctccattacaggatactttacaacgttatttaaaagttattaaacctttagaatctgaggaggaatatcaggaaaccgttaaatcttgtaattcatttgcaaaatcaattggtccaaaattacaaaatttattaattgaatattcaaaaactaaagattcttatattgaacagttttggtttgattcatatcttaattatgattctcctgttgttttaaatttaaatccttttattatgattgaagatgatccaatccccggtgaatgtaattggattaatcggggttgccaattaactaattcaactttaagatttataaaagctttaagaaataaaactttaccagttgataaaattaaaggcgataaacctttagatatggatcaatatttaaaattatttggaagttgtagaattccaactaacaatggttgtgttttgaaaacttatgaaaatagtaaacatatagttgttgtcgtcaattctcaattttactggtttaatgtcctggatgatgataacaatttattattaacagaggatgaaattaaaactaatcttaaatcaattataaatgattcaaccgaattttataataaagataatgatgatgataatagcaatgattcttcaagtattaatattgctaaatcaagttttggtgttttaacaactgaaaataggaaagtttggtcaaatttaagaaacatattaaatagtgattcaattaataaagaaattttgaaaattattgattcttcattattttgtttagttttagataatttagaagttggtcaagatgcaaataaaatttcacaaaatttcctttgtggtaaaagcattatcaaaaatggtgttcaaattggtacttgtactaatcgttggtatgataaactgcaattaattgttacaaaagatggtaaatcaggtataaattttgaacatacaggtattgatggtcatacagttttaagatttgcaagtgatatttatacagattcaattttaagatttgctaaaactataaataaagattccccaagtttatttgaagatgaattacctaaagaatcaagaagatcaaattcaaattcagataatttaacaaattcacctccaagaaaattagaatggaatttaacaaatgaattaagtttatcattaagatttgctgaaacaagattaagtgatttaattagtcaaaatgaattttcaactttaatgtttaataaatatggtatggaaagaattaaaaaaatgggtatgtcaccagatgcatttattcaaatgagtttccaattaacttattataaattatatggtaaaattgaatgtacatatgaacctgcaatgacaaaaaaattcttacatggtagaactgaagcaattagaagtgttagtgatgaatcttgtttattagttaaaaatttctttaatgatgatattagtaatgaagaaaaaattaaattattgaaaaatgcatgtaaagaacatagtaggcgtacagctgaatgctcaaatggtttaggacaagatcgtcatttatatgcactatattgtatttgggaaaaatatttttgtcaaaataataatagtgaaagtgattatagtagtgaagaggaagatttgattgttaataaacaaagtgatgcaaatgatgaagaaattccattaattttcaaagatgaaggatggaaaaaattaaatacaactataatttcaacaagtaattgtggtaatccatcattaaaaatatttggatttggacctgttagtgaaaatggttttggtattggttatattatcaaagataatagaataagtttctgtgttagttcaaaacatagacaaaccagtagattcaccgatacattaggtagtgtattaactttaatggaacaagttaattcaataaattaatttaataaatgtgtaggaggattgtataatttaacgactaaataacgattattataattataaccggataatttatcaactgctaaatttgcagcctttaaagttgtataaattacaaacagttgaccttgagtttgaggtgtatttgatagtcttaactgatgaatttcaccaaattgtgataaaagttcaatcaactgctctttattatgttgtatcggcaggttttttatatgaacgattggtagtggaggcatttgttagatagtttattgatgaaaagaaagaaggagtgaatggaatttatatagaaatttaaaatgcacactgaattttttttcaaccgaatccatgcattacattcatgttgttgatctgcgtctaatctacacagtcttcttattgagtaatggattttatagaatcacagagaccaatttatgaattaaaggcaagagatgagagaatattaccaatagatgaaggatttgagagtaaatattcacccaattccaatggagattttatgaaattattaaatggtaaagaacctgatggaaatgttaatctacgatatgaattatttcagcaaaattggcgaaaacaaatgagtagtattaacaatgttttgttgaaaaccgatagatttaagtttcgtagtttaagagaatttttaagatacaaagatagacaatttgacgagagattaattagtggtattttaaatttaggttcaaatatatcaaatcatgaaaggttgttagttaatgtttgtagatatttaagagaggaggatgatatttgtttgattagagttaatcctggtgttgatttcaatatacagagaattgttagaagaatagaggaagctatggtttatgaaatacgtcaaagaggaaatggaaatagaaaaggtaaaaagaataatagtaggaggaaaaggaagttaaaagatttagaaggagatgttgataatgatgatggagaaattgaaatgaacattgttgaacctatttataatgttgtcaagggtaaatttattgatataattgatatgcttaaggaattcaaacgtatgaaaattagactagttgttatgatagagaatggtgatagtatgagtaaagagttaattgaaaatgtgttgaatatgatgtatgaatataatttatgtggagaagttcattgtttgatatgtattagtacaccatttattatgtttgaagagaaaatcagcgttttagtgattggtaaattaaagagttgtacattttcaattgataattctaaggaagctattggacagattatggaagatttattattaaatattaatgaaacatataattcattaatttttgaacctagattagttttaaaattcttgaaaatgaaagaagatatgagtatagataaattcaagaaaatgataaagatgatctatatgaggcattattttagtcaacctttaagtatattttggactaaagatttcagtaagattgaattaaggaaaatttattttgaaatatttaagacattaccatctgttatgatgaataagggcgatgatgaagaaaatgggagatatttgaaagaattagtctttagtgaaggtggaactgaagagaataagattattggagaaatgttgaggtataatttgaatagacttattaattggagatatgaattgagaggattgattgattttcttaattttttacaagctatgattatgaaggatgaagagaagaaaatatgggagaacaatttagaattatttgaaatgatatttgggaaatattatcaaataaagaaggagggaggtaatgaaaaggtaattaaacgtaaaatgctaagaggtattagtagaatacttgagaaaatgtggagagtgttaggatccaatatggatgtcgaaataattaaaagtataatggatgatgatatgatgaaaggatacaccgaagagagtgttagtataactgatatggcggaacatgctgaaaagacaatttcagaaaaagttataatgttagatttagaaggacaaatgtttcgagaggtatgtgttgttggagagaaggcatttgatgagagtgttgaaggagataatccatcaatgagggagaatgtattgagtatgttagaagaaggtacatttacgtgtgaagtatggagaagtatacaggaatctggaggtagtagggtttcagttggagatcttgcacaagcgatgggagttactaataaagtagaggctgcatggctagtaagaagtgtttgggagttagatggattaggattagtatcaattgataatagcaaaggtatcattgatagagttgtatggagaggtgtgtagagattactatgtatattagaattttttttttatctaacaaattttatgtttcaattttttatagaaagtagttggttaagttgtattgcttcattgacttgtttgatgctacttgacaaatgtcataaatttttaagacaaaatatgctaaggatataaatttgaaaagtgcatgttaatttgctgaaaaataaagcaaaataagattaaaagccaaaatatactgaataaacgatccgataaattgatttgaatgttaattgtttattctatataagatagtataaaactctagttaaatataattttagaaactaactcgcccattaattaccaaaatatttgtcataaccagtcaagacaaatctaaatttaacatcacccttaaccattctttcccaagcagttttaacatttgcttcactaatatctatagtttcaatcattggtttaatgttattctttgcagcaacttctaacatatattcaatatcttttggtgaaccaataagtgaaccaccaactgaaatattatttaataacatttggaatggagaaagagttaaggtatcagtcatcggaggtgcagtaatgaaaatcatttgaccatatggtgcaagtaaatttaaaactgaatcaactgcagtttcactaaatgatgatgcagtattaactaataaatcaagtgaatcttcatatttagttgcaaaatcttcttcatcagttgcaatgtaatgatctgcacctaatgataatgctaattctttctttttatcattacgtgaaattgcagtaacttctgcacctaatgccttagcaaataaaattgccatatgaccaataccaccaataccattaataccaactttagtaccctttttaacaccataagttaacattggtctaaatgctgtaataccaccacataataatggtgcaacatcatttgaatccattgattcaggaattttgaatgcaaattgtgaattaacacgaacatgagatgcataaccaccttgagcaggtttaccagtttctttatagatagcaccataagtataaacttgatgtttacaattattttgattaccattttcacaacgtttacatgaattacatgcatcacattgagcaccaacaccaactctatcaccaatttggaatcttgcatttggacctcttgcagtaactttaccaacaatttcatgaccaacagctattggagcatatggttcaccaaaatcaccacaagctgcatgaatatctgaaccacaaataccacatgcttcaatcttaacttcaacatcattatcacgtaactcttgtggttcgtatgagaattcctttggatttaaccaatccttgtaatcaataacaccaattgctctaaaagaagtagacatttttttgttcttatttatcgttttctttgtttttttgataaaagaagaaagtaatttaaggttaattaagcttaaagtaaaaattggaatgcaaattgtcctttatataagcttaaatatttaactcagagagataaggagaacgtttttagagatggaaatagacggatttatttttgcatctgatgacgtattagtttgaagatcctattcatggggtatagaagcaaccaagaccatcgatggaaataacaaaaactccgttttgacacagagaaaaaagaaggatttagtcctcttgataattatctccatgtttaacagacatttgttattgtttttcaactttttttcacgattttatatctccgtcttttaaaacgttatagtccgtattacgcaatgaaggtcataatttcttgagattatgtaaagattcacttagctctggataattcggagttatcagtttctttaattaatgaaccagcacatttgtaggggactttctaatgcttaaactgttcagaatagaattgtttaaataaagctataataacctagttttcttgttaagttattggaaaaaaaacatatgaaggtcaacggctcatacaacatggagtactatcaagcactaaccacaatgaaaactattatccctgtttaatcgattctgaaagcaaggtaaaaagtgtatataatgcattaccaaccattatagaaaggaattgctaccactaaaattgcactttaagtttcccccttaatatctttggttgtattacgtaattgcactttactgcgccgtaactttatttctcgtctcgtttatcatttactgcgccactattttctcatggaggttttgttgtcctttccttcaattgagggattgattgattgattaatacgaatatattgtttactatcaatctatctttctttattatttgttattattagtatctaaaagacaatgcaaatctattatttaggagttttacaaccagacgaggatcactctaaggaactcgtatcctctcacgatacttcatcattcccatttttccaaagatcaagtgttggtcaatttcttactttctttgcagatacaattgcaacacgtactccacaagatggtcgtcaaagtgttgaagaaggtgcatatgttggtcatgtttatcgtacgcagggaattgcagctgttatgattactgataaatcttatcctattagacctgcatttacattacttaataaagtttgtgatgattgggcttcacaaagtgaaatttctcaaagtgaaatggatgcacttctgacaaaatatcaatcacctcatgaagctgatgctttaatgaaagttcaagcagaacttgatgaaacgaaaattgtgctgcagcaatcaattgaaaatgtcttacaaagaggtgaacgtttagatgctcttgtagataaatcatgatgcacttactgcttcatctaagactttctataagcaagcaaaaaagactaactcttgttgtgtcattgtatagttcatataattgtagtataaattaaattaataatagctgcttttctataagttaattaggcaaatactataccataccaatcatctcgctaattactatgaaaaattatcttgaaccttcttttaacattaattactaatgtatctcttttcttttggcaatgtttagctgcacttactagactgtctaaatcaagagttcaaatggccaccatttccgcatgtgccgtctcttctgcctccatgtattatgttatgatgaataaggtaagaaatgattctttacttcctgtaaagcaagtggcggaaatttctgaacctcaagaaactcaacaagcttcagaatcttcagaatcttcagaatcttcagaatcttcagaatcttcagatgcaaccgatgcagcttcctgcttcaactgaagaatctgcacctactgcttttaatgaagaaactggtgaaattaattgggattgtccatgtcttggaggaatggctgatggtccatgtggtgaagaatttaaagctgcattttcatgtttcgtttactcaaaggaagaaccaaagggtatcgaatgtattgataaattcaagggtatgcaagaatgttttagaaaatacccagatttctattctgaagaattaagagatgaagaacaagttaatgatactattgcaatgaataatgatattatcgaatcagttgaagaagcagctgttgaaggtaaacaattagcttatgatatttattcaaaggctcaaaataaaattgatgaatttaacaagaaataatcaatttttaatcaattactgtatatataataaaaaactataaatttaaaattaaatagacaattcattcaaacctattggatcaccattacgcttaaacataacttttccttcaaagtaaacttgaataccttcaatactgtaaatatccttaccattcaaagtaccataaggtattatactcttacccctgttcctcacaccattgaaaaacaatatctttaatagttccaatattgttaggtttggatcctttactaaatgttttcccatcgttctcccaaagttctctgacttttgtaattattttaacgtattcttcttccataagccctaaaaatgaaatgatttcagttaatccatataattcgagattaaattgttcatattcattcaaatatttggaaaacacttcatcataaaaaacatctcccttccacatcaaattgttcaagtgtttccacaaacactttgtattgttctataccttcattactcaaaatatcagtcttcgccaatatcactaactattttacaatatttgataacataaggttctaaatcaagacctccatttgtccatgttttcatatctgaatatgtttcaataaaatagtcgacattaaggtaatttttttcaaaaatcatttcaagaatcttttcaccaactgcatctcgtataacttctttataatcactaacatcccatagccaagaatctaaccaagtgaagttcatcaccatatcccagtcttaatttcatttaagaattttggaacaataatatctcttagaatatcatctttcttgaaaagatgtgcctcgtcgatctcctccaaaaccccaagacctgcatgctcataatatggttcccattcttcgtaaaaagtcttaagtttattccatattggttcaagaattatacttttatattcctggtactataatattaactttcaagtattcagatgcagcatctaaaattctacctaactctagcaatatcatcaaagtcacaatctttcactctctcggaccatattggttcaatatatttcccagctaaaaggattaagtctttattcactcgtgaacttgaagagtttataacttctaacagttcttcccattcttcatcatttgaaaccgtatctatcatcctctgtatactacttctatccttttcctcaatttcaattaattgattcaaacgttctatttcaaataacaaatatttctcctttgatgcatctaatcttaattcttttaaaatcccataaagtttcattttaatttcaacttcctgtacttttttccaatattttcaataaatctccatctaaatcaacaacttcttgtaatcctcttatgatatcatacaattccatttcaacaacataatcagagacatattcaccttttcctttcgaaaacctaatggtttgtcattaaccttgaacttccctagttttatcaccctcttcttcttcatcctcatcttcgttatcactgtaaccatcatcttcttgaataacacgcatcattccaattccttcacctttttttccttaattcaggtataattggttcaacaatccctgtaccacccttcccaagaccagttccagggacgtatcccattttcaacatcagctttgcacctggcccatacttagcaattaaatccatgtatccggaaaaagattcgcctaatgaaaagtaaacaagatgccattacaatgcaatattaattcatgtgttgtttgaaatttttaatatttcaccttaactaatttctttctacaattaataaaacatttgataatgaaggtaccaccattaccacatataactccacgatggttttatgcaacagatataccaattacaaaaccatttaagtataatccaactgcaagagcaactaaatttataccatttacaaccggtgattccgatagaattgaaaatgcatatcataatagcaaaccagttaatgtcaatgaagatggattgtttacagttgatttacataaaaagataatgtcaccatgtttattggacaggaccaggttatgaggtacgtcgtggaatttggtttaatgactaataatcctgtacctgatttaataggtgaacaaattgaggatgcttttaagaaatatagaccggatttacatgataaagtaccaagtattagattgaagagtgaaaaacaattatttcaagagaaatatggtaattggccttattcacaatttgatgatttgagtgatttagataaaatactacatttccaatccaaagatgaaggagtgctgttgaatgaaggaggtgtaccaaaaattgttattgactaatttaccaggatccaaatcagtatttggatatgttgttaaaagaggatatattgatgaagaagagggatgaaaaagatgaaaagaagcaaacgaagaagaaagttaagaaagaaaatgagaagaaagaatctgcaagtaagaaggtcggtgatcctattgatgaaactgagggctcaagtgaaacaggtgactctactaatgtcttagactctatcaaaaatgcaaagttggttcattttgattatactacattattgaatgaaaccaataaaatgtttcaaagtattatggaaaatgattttgcaaacaatagtttagattataataacgattatgatagagaaattgatcatttagttctcttgtgtacatggtattggacaagctctgagttccaaatatgcatccatcaattttgcacatgattgtaatcaatttagacaattgatcaaaaaggaatttatattgaacaatccagataaagacgataaggaaaacaacgataataacaattgtaaagttcaagtactaccaataatttggagacatgatattcaaatttgatcgtatactaccggatagtaaattaccaaagttagcaagtttaagtgttgatgcagattcaccaataagaaaagtaacagctgatgttcttcttgatattttattatactatgaacctaaatatcatgaagcaaatgttacaatgtgttgcaaattatgcaaatgaaatatataagaaattcctatcaaataatccaaatttcaaaggtaaagtttcacttgttggtcattcacttggaagtgcaattgtcctagatattcttcatagacaaagcaacaagaaggttttggattttgaagttaataattttttctctctaggatcccctaatggtattttcaaactcattccgtggtgaacaaattcttccattaatgaaaactgaaaactataagaataaaaatgcagtaactccagctatcaactccatctataatattttctacagtacggatccagttggttacagaattgaagccactcattccataacgattggagtgatgttaaaccagcagagggtgaacctactacaggtaaagttccacctgagattaaagaccctgtagcattgaaaagggtacaaatgctaaatcctacaggaagggtagattgggttttgaaaacaggaagtttggatatgtttggagtagcatctcatattcaatatctctctgatccaaaggtagcccgtatacttctgaaagaactaaatagacaataagtaacgtgtatataacttatataataaagagttaagaaaccctgtaatagtaaatggggttccaaagaaggctcaactcgcgcatttaaaactataaaaggtgaccacctgtccacttttcaaaattattccttcactagcatgtttttcatgacctttagctttttcttaccaaggacaagcaaatcagcagcatctctgtcagaggacagatgtaactagttgtttaattcttgtttttaatacttttatttttataatattgtgattttgtgtgatttaaatgatgaccaatagtttgctgtgcaccattctgagtactttattgtattttatgacagatattcaaacttgcttattcctgaactttacacaccgagtcactctagtaatttttcctccgatgcacaccggccttgttttctgcctgtgatgatttatcggtaattaattatattaccttttctttgcattgatgattcatgccgggcactttctgcttatcgtaaatttttacttgataatttaaaattataaaattaatacatacatggggtagtgctgatgtccgtccccaaatcctattattatattacttatactgccttttcttaaacttatatgaaataatcatgaatgagtcacatactgatagcgatacattctacaatttgaaacacattcacgttccctgctaaaccaaagcattcatatgatattgatagtttaccttcctctttggaatcatcttctaagaaatctattgaattatcgcctcgtacttcactgattcaaaatcatcctccttcacctcacacaccatcgagttatagaaattctgtcttttcagcacataattatgattctccaagatctctcccttcaccaaaagctgcaaaggaaggtccatattttgatcaaccaagtccaataagtccatgttcttccatgtttcaagaaactaaatctccatcaaaaccaatttataggaaatccatgggattttcagagttctcattccctaataatcataatactagttacaatatgcatcataatccatccttttcaaataaatcaatacgtcgagtttcagtctcatctattaaacatctcggacatcgtcggagtttgtcaatttcaagtaatacaatgtcaatagactcaaacagtaattacttacataaaaactttctcccaaacaagtttgaagctaataacgatctcattgatatgtatattaatcccgtaaaatatggaaatgtgaataattacgatgccgatgaagataatgaaactgataaagaaagattagatgatgatgatgacgaagaggaggacagaaataatcttagttcaagctcttattcaatgctaattgatgattttgataacaacacagcagacgtaaaatcttcatcatcttcaataagtaccggagttgcacagaaagtttatatgggtagaccatctgttgtttatgttgtctcatcaccaaattcatgcgatataaatcttaatgtgatagatgaataagtaaaatttaacatttacattttaattaattaaacaagtttacatttactaaatacaataatatacccaaagttcagttttaatttcaatttgctttataccactttactttacaatgcttttctatagtttaaatgctttttcaggtgctttttcagtttttttctttttttccttttctatttcacagagatatacattacattatataccagtttataaaaatttacattaaatttcaattattgatcaagagtagtctttaatgactttaattgttttaaaatagcaactttagcggtaccacctgttgcatctcttctttcaactgattgttcaaaattaaaagtttcaaaaacatcattttcaaaacgttcatcaattgatttgaattgttccatagttaattgatcaatacctgatagtttgttttcttcagctgctctaacacattcacctgaaatatgatgagtttctctaaatggaacaccttttctaactaaataatcagctaaatcagttgctaacatatccatacttaaagcttcaaacattttatctttatttggttgtaaagttgaaatgacaccagttgcaatcaaaatagaatgttcaacagttaacattgaatcaaataatggttctttatcttcttgcatatctttattataagttgaaggaattgattttaatgacatcataaaacccgctaaactaccgaaaacacgacctgatttaccacgtaataattctaatgaatcaggatttttcttttgtggcataagtgatgaaccagttgaatatgcatcagctaatttaataaaaccaaattctccacttgaataaataattaaatcttcagaaaatcttgagatatgattcataaataatgaactccaaaacatagtttcaacaacaaaatccctgtcagagacagcagttaatgaattaccaataacaccattaaaacctagttcttgtgccaaaaattcacgatcaattccgtaaggatgaccagctaatgcacctgaacctaatggtgaataatttaatctttcaataatttgttctaatcttttataatcttcagtaaaataagtggcatacatgctaacccaatgagaccatctgattggttgtgctctttgtaaatgtgtgtaacctggcattaagattgatacttcttcttcagctctcttaatcattgtttcaataaaaattttaagataaccctttaatttttttaattcatcacgagcatataatctcatatcagttgcaacttgatcatttctagatctaccagtatgaactttaccagaaatatttctaccaataatttcaccaagtcttctttcatttgcagtatgaatatcttcatcaccatctttttcaacaaatttgttttctttccattcttcatggatgattgcaagtccacgatgaatttcctttaattcttctgcggttattaatccaagtttttcaagacccatggtataaactctagtaccttctaaatcttgtgcatacattttcttatcgtaaggtaaagatgcattatataaattcattaaaggatcagttgcaccggtgaaacgaccaccccataattttaattcagctggttgattgctcatgttttttcttgtttgttatataaaaactaaatttataaaacaagagtaaaaagaaagaaagagtagatgaacaaaaaaattattcacattgaattttaagtgaacaatttgttggaatataattgtcagattgaattactcattattaaatagacaaattaagcgcgctaaccgccattgagtcattgcctaattaggcaatagacatttcgacccatcgaccaaatactttaaatctatacgatttatacgagcaatgtttgaaatttcataatgatgcatgaatcgaatcgatttaatagaaaggatgtaaatccaaaaatgtatatattctgtaaagatcaagaaaggttttgtatttgaaaatggctacttctatggattcagtacttttgattggtggggctgggtttttaggtcttcatattgttcaacaattttgggaacaatctccacgtcctgaaattcatgtctttgatattcgtccattacctgataagatttcaaaatattttacatttgatccaaagaaaattcatgttcatgttggtgatttaacatctaaagatgatgtcactaaggcaatcaaggaatcaaatccaagtgtaattgttcattctgcttctccaattcatggtctaggacaagaaatttatgaaaaggttaatattcatggtactaaaaacttaatagaatgtgccaaggaacaaaaaattcgtgctcttgtttatacttcatctgctggtgtcatttttaatggtgaggatgttcataatgctgatgaaacctggccaattcctgaagttccaatggatggttataatgaaaccaaggctattgcagaaaactatggttttaaaaggccaattctccatcagaaaacttttacacagtcgctttaagaccagccggtatttttggccctggtgatagacaattagtaccaggtttaagacaagtcttagaaagaggtcaaactaagtttcaagtcggtgataataataatttattcgattggacttatgctggtaatgttgcagattctcatgttttagcagctcaaaaattacttgatccaaaaacagtatcagatgttggtggtgagactttctttatcactaatgatacaccttcatatttctggactttggctaggaccgtttggaaagctgatggccatgtcgataattataatattgttttatccagacctgttgcaattgctgtaggttacttatcctgagtttttctcaaaattatcaggtaaagaacctggtttaactccatttagagtcaagattgtttgtgcttatagataccataatatcacaaaggctaaaactatcttaggatataaaccaaaagtgggattggaagaaggtataagatatacccttgattggatggatgaaactaaaaagcaatgattttcattcaattacatttattaatgttaacaaaatatttattagacgacttctttcaatttccttttagttaaatttatgttccatgatttcttataaaactaactcttatgtactataaagtttataatatacattctaaacgttttcacatataacacatttcttgtccgcatcttcactcatacccatagttatctagacatttacgatgaaatgcatgtttacacttgaatatgaaaatgctatttttgaaattaaattgttcattatcagtatcttttaattcaagtaaacgatctctccaaacttcataaacatcatttccaactttactaccccaaatatttttaccacatgtagcacattcgatatttctaggtgaccttccttttttctttaagtcctctaaaatattcaagttttgaaatatatctccatcaaccagagttttgactagttttagaatcttttcatcagctaaatatgaattaaaaatttcctttaaaattaaattaacatcacctaaggtagtaacatgaatagatgacccatctaaaaatttcttgaaaatcttactgaatgaagatgaagattgttcaacatttaaattaattacatttgtaaatgctgctcttacaattttggtgtaaaaaacaaacacctctgtatctttatcactatcattttgtttcacatttaccttatttaacattctgacgcatgtttctagaatttgcaacagaagcttctccttcaaagtaaattcaccttcattttttgataattttaaattcgtagaagataatggcataaaagatttatctaaaacgtttccatattttgtcttctaattccttattacaccctttctcttcaatttcttttgtcacagattctataatcttacatattttgtcaatgctagacttataatcatcatgatgtaagtaccaatcaatcaatacttcaaaattatccacttcaagcattctgattattgattcatccagttctgatagagtaaaaataaatgattgaattttcagattcaaatcatttaatttggtgtccaattcttctttgtacttcaacaccaagttctttgttattattaaaaatcagattttgaatagtattaccttttcctaattaatcctctgagatattcaagctttcaacgtttgctccacttctttattttcaatcttcgtattaatatctttgatgtcaaaaaagtcttttaaatattcaaacttcaaactagaatctttgaaatcaataacttcagcatttagatccggagagtataccataacaatttctgctatcgctttcggatcatttcttacaaataattctaagttgtcacgaagtaattttagtaattcttttttatcaaagctatctgaggccaccaaagtatcctctaatatctcacaaataggcttaaataactcacaatttgtgatattttcattttgaagttttacccaaagttttaatacatcaaataatcgtccctctgattgatagagtgataacaaaacttcataagtaccctgctctctcaatttggattattatagattcgatatcaataggcttataaacagttaacaatgtcctaattgctagttgacaatcctgcaatgtttcttcgtcgatagattctaaaaaatccatagaatcactggcttctggatcgttgttaattgtacctacaagacagagaagttgaatcatttcttcagatgtactatcagccaatcgtatgaactgtatgtatttgggataatttcttccaatgaaaatagccattcttattttatcaatcgttgtaagtcttgcatcttgatcatgataaatacttaataaaatatcaattatatactgcctgttgacttgtagcttgtatgattcatttgcaaatgtatttatttccaattcattcagcaactcatcttcaaagcttcattgagacaactaaacatagtttgactatcgtacttcaacaatgcaaaaagatacgggaaggttggttctaacatccagtcattggttgtatgcacgactccaccatcagatggccaagatattgcagatccattgaataatagatagtaaatattgagtttagcagatggattgtctattaaaggtttattagtgggatactgtctatttgtaagggtgtatgaaatgaatggatatacataattaatatcacttttgactactcgctgttgttctgtattgcgagtgtcattttccaagagttttattttgctaatagagtccataaatggagtaatataatcatgtaacaatgctgtccagatgtaagtggaagtttcattcaagtggtactttttgcacagagaaagagtaaagtctatatcaagttgttcaatatctagcaaacaaaccaactgttctagaatagctagattatcaactttactataatattcaaccattgattttaagatcgaaggtgagaatgttgttagctgggaattaaatataaaaatctctaagacactgaaaaatatatcttcggaatcaatactcattattctttcatatatcatgtcataaacatcaattggagctttaaccatcaaacaagtttcaataagtaatgttactatttttcctcattccatatatttcaatttctgaatcattgaatatgtattttatagttgatttaaaaatttgtactaaataaacactcaagagcttctctctctctctatcatcggtaggaagagaaatgagtggcaggtattcatctccagtaaattgtctttttgattcttctaaagcttctacgtatttcccatttgagagtaaagataaaagtatatcagcccagtttggaaggtttccactaactaattgatttttttccagtattaaaatatttgattttaaagtattaagtacggaatgaagacatccatacgattcacccaaatttaaattttcagaggataaaactttcaagctcttggaattaagtaaaaccatgttttcagagtctgtaatcacaagtagtatatcatgattcaaatatttcaaaatatttattggatgttcaatatcgatactctttgtgttatcaacgtgaatattgcagctcatttcaccagattcatcaatttggtcttctgaatgaactttcacttgataaatgatactaccccaacaataaacaagtaaaggtaactcaagattaccatgtgtatttttgattgcgggataccaactaactaacccagaacttcctatcttcatcaaaatctttattatctatcgtcaaaaaagttttgaagttggggtcgagtagaagcaataactagataacccggtgtgatatacgcaaataaacatagtttatctgcagttactacgtttgaaccaattggtaacaattcaaagtccaaagaatgatctttattaatatcatctatgtttcccagcacataatcaccactaattattctgctttgaacgtaattacccagaaacgaacgatgtccataatgcaatataaccatgccagaatcatccattgagataaacgtagtgtgttttgttccaatcactctgatcttagtgatagatgttccatattgatgcgatatatggaaatgtttcccattgtattgtaactcatgtaaagtgactggccgtatagtaatgagcggatttgatctttttagatcccatatattaataaatccgtttgaataacctgtatcaaatagttactgtccatagaaatttcaattgatgtgatggtaattaatccatcaatgatcggttgtgattttggtaacacttttgaggaaaagtcgaatggttttaattccctgactagattttgcttgtaatcaaataatagtaaatatccatttaaagtcccgattactatgtaaatttctgaaagtctttgacatatgggtttaccatatacatcattgttagaatcatataagaatgctgatattttacttaaattgtgccattgaacagatggtgtgctcaagaagagtgattttgatgtatttgaattttgttcatattctatgaatggttcattctttttggggtatttcaagctcgacttcaatctttcatcaaaatgtctatgtgatagcatttctgcactatcatctgatgagttcatgtattttgagtaactgtaaaccgtatctttgtgtgaataaactccatggaagccattgctttaaattatcatgctaatgcgggctgacatttttggatgcagaacgaccgatgaactttttcaaattgttgatgtctttgttcttttggcaaaatctgtatcgataatcacagtgaaggtgatattaagatatactagagagtacttatggatccatggaacactatcggagcagcaactgctttgttcacttcacaagatattacttattcacaagttttagcagctaaaaagggattacaattacttgctgacaataaagatacagttttacctatcgttcaactttgtttggcctgtgctgacaatgatgtatatagtattaaggatatattaacagagaataaaggattattgaataaagctgatggtaagggactaacaccattaatttatgcaattgtatttcataacaatgaatgtgtagatttactgctgacttttaatgttgattgtaacgaggctgataatttggttggttggactccagttatgtgggccacccatcttgattttgttgatcttgtggaaaggttaatttcctataattctgacccattgaagaaagttggcaaaagtatgaaaaatgcaattgagttgattaaaaaaggatcaaaatgtgaagagtactataaaatccatggatatttaagagaaaaatctacaactccagaacttgcggatgattttttaaaaggtatggatataaataaaacaaatgaagaagaagaaaacaaatttataaacgatgaagatgtatttgacagcaatctatatgaaacattcaacttcaactatgttcaaaaaaaccaatatatcaaattccatgatagtaacattagagcaattatggactatgtgtttaaattaccacaaaagtatcacaataaacctttatatccatcatccattatatttcaatgtttgagatatgccgaaagtaaaatggccagcggtaagatggttgaaactttagtcgatctttatcttaccagaataagaaatgtcattggtacgaaaagtggcatagttcaattttgtggtgcaaaggaaagaaaggagaaagagaaaaaaatgaagaaagatagaaaagagggaaaagaagttatcatagagccaaatgttgatattgttaccataggttactggatttcagcaattaatcatttatattatttcttattaagagatactgcctgcgattttttgaagaaataccctaaaattcttcaagatttgatcagttgtttgcaaagtggagttttcaagttagtttttagcatagatagcaagctggagggattacttgactcgtgtattttggaatataacagtgtacctgatctgaatgttatttataagaatgattggaaaatttttaaaaagaaagatcaaaatgctgataaaacatcatatgatgaaattatagatatgctgtacccaccaacatacacagaacaaatgaaaccatcaccattgaaagtgattcaaactttaggagcactggtttatgttttggaattatttcatatcaatgatgttattaagcaacagtgtttgggaagtgtgttatattttattggatgcagtttgtttaacagagttttaaataataaaaaatattgttcaagagttaaaggtatggaaattagactaaacttgtcatatattcaagattggcttagaatgaacaaccttcacccatccccaaaagatgaaaaagatacagaatttccggatagtttgattggaaaaagtagaggataccttgatggtgtgtgtagatacgaaggtaacgaaagagatccaaacgatggggattattatatgaatccattatacaatattggacaatttacattatcacctattattgaactcgcagaatggttacaagtgcttagtggaattcaagacttgggaagtttacaagatgtgatcagtaattttgaaattttatcatcaagttctatggtggagagtatacgtaattatcattatgaagttgatgaaaagaaattttctaagagtttaaaaaaatggctaaaggagaatcctattaataactggggggaatcaaaggaaagtaaaaatatgagtattaacatgaacgataagggaatatttttgaaagaagataagcatgatatattattaaattatggtcaagttttcaatgtttgtttacctcagcttacccaattattacatcaatatggagcagattttgcacatgttgatgagaagaagttaagggcatatcaaccacatattccattagaaattcgtgatgaaattgaaattgaaggagatagagaggaagataactatgaagataattattacgaaaagaatgcatttgttaatgaaaattctactgatgattatgaaaacaataccgaagaagaagatcataatgctgttaatgaaaatagaagtaatgaaggacatgaagctgtgtttccatcagaggaatcagttccagagagagagaaatcggcagtgcttggcactgaattattcgacttaactgcacctgaaagtgtagcacgtaaagcatggaacgataccgagaatccatgggcgtgaataaatcaatcaatgagattgtatattgtaccgattgttgtatactttacttatcttgttgtatttatcttgtaatagaagttaataaacggttaacaggcgattacgtaacactatcaccaaaataatactccgcctccttattattatagggtcgtaaaaattaaaaaaaattattatggcttgcacacggtattaaattgtgggattttaatattgttatttttttttaattagaacggttgatttattagcaatttgatcttcacgtctttaaatatacaataatagacacattcaatgcacttgaattatgcaaattttaaccaggataactcatgtatttgtgtgggttacgatactggatttcggatttatgaatgtgaaaatttcactaaatgttatgaagaaatggaaggcggcataagtattgttgaaatgttatgtaattcatcattggttgcagttgtaggaagtggagagacatcaactgcattatctaggcgacgattgagaatgataaatacaaaacaacatacaacaatctgtgaattaactttcccagccgcaatacttgctgttaaaatgaatttagaaaggttggttgtattaattgaaggtatgctatatatttacgatattactaaaatgagacttctacatacaattgaagttagcaatgccaatagtaaaggattagtagcattaagtatggctagtaatgttgtttatgcatgtgaaggtgacgttgttgtatttgattgtaaaaaattagaagctgttgctgttatttctgctcatagacgtgaagttacagccttagccatcaataatgatggaacaatgattgccacagcaagtgatagaggtacattgattcgtgtatttgatgcagaatcaggtgttaaattaaagcaacttcgacgaggcacatatcctactaaaattagtgcattatcgttctcagatggttggcttattgcaaatagtggaactggtactattcatgtttttaagatggatggagatgaaagtgatgatagtataatcgataatgaatctgaacataatgttgcagaagatgatgtagcaagtatgagttcagatgaagatttccaaacctcatcttcaaattccaattctaataatactacctctaataccaacgctaattcaaataccaatccatcattaacacctgctccaacaaattcaatgggacgtattttacgtcgaacatcacaaacccttggaagacgtgcagctcaaagtatgggtccattactgccaccaagagttttaggtgttttagaaccatcacgacattttgcttcatgtaagttaccattgggttcatcaactccgactggattagtgggactttcatatgatcgtatagtaggagtttcagaatcgggagaagttttagtttacggactagataaagttaaaggtggagactgccaattgctagagacaacatctattgtataatgaaatataaatttaattttaaataatgtacatgtgtataccagagtattagtaaagtttaagaatgtaacataacaagtagaatatgcagaagtcattttattacgtaataataataaggtaaaaaactggggggacatagctggcaaattcaataatagtgcgacatgacttatcagaaaaggtgacattggcggtgattatccatgttactttcattggtgtttggtgaagttattttagattgttgtaatttatttcaatcttttgatattttaaacacagtaagaagttgcatttacatatagacgaaataatataaatgaagcaacagaaaaagttaccgcttttcgatattcgtatagactctatttatagagatactattattttaaagggtgtaccatcggaagcaccatcagttatgttgtcaggaacagttgctttatcagtcaaagagccaatacatgttcgtaaaataatgctttcattttatggtacattaattcataataattcatctaaattagtttattgttttaattggtcaccaatagatttacattcaccaatttcatcatcatttactcaacaacattcatttacaacgggtacattaagtaaaactaattcatctctatcattaaatcaacattcacgctcttcatcacatacttcattaacaaatgttcatcaattaccaagaactaaatcaacatcatcaatatttttttcagattcagttcttcaacctgggaaattatgaattcccatttcaaactattttagatggttcaatacctgaaacaatatttgatcattcttatggcttcattagtttatagaattcaatgtacgattgaacgtggaaggtttagtaatccaataattacgagaaaattagttaatattgtacgtacattatcatcggataatcaagatttatctgaatcaagtgcattagataatacatggccaaataaggttgattattcaatttcattaccatctaaggcaatagcaattggatctacatgtttaatatcaattatgatgcaaccattggctaaaggtttaaaattgggggcaattaaaattaaattaaatcaatatgcaacattttcaacattaaatggtaattataatgatgaaaaaaacattacaactaaacacataccaagaattacaacagttgataatattgatatttggtcagatgatgcaccaattgatgaaaatggagttttctattcaactaatcatatgacattatcaactgatagatgggaaataaatacatcattaattataccaccaagtttagagacaattacacaagatttagatattgaaaatatttgtaaagtacgtcataaattaaaattttcaattgcattacttaataaagatggacatacaagtgaattaagagcaactttaccaataagtttatttattagtccatttgtaccaattaaaattaaaccaatagattattatatagatcattttcaaaatcattcatatgatgatgcatcaattcatgttaataaagaagatatattattttcacaaaatgattcttcagttgatattaatggtgatacacaaaaattaatggcaccaccaaattataacgatagattttatgatagagttgtcgggtctgacaataatccattacctataccagtatctgcaccagtatctacaattcatagtcatacttcatcatcatcattatctaatagtaacacagccacattatcaagtaatataccatcattaccaccaattattcaatctataccattagattcatcagcatttaataatgctttaacatcaactacacaatctttatcatcacatccaacatcaccattaatatctaaaagaaccagatcagcatattttagtatcccaactgatgatgatgatgacgataatgaaccactggatccatttaacacatcaccaaataaatctaatcatgataataataattcaattatttatggaccatcatttaaaactggtacaaaattatcaatacctaataataatagtaatactaatttaccaccaaatataatgacaccaggtacattatcacctgtacaacatttatcaagagctacatcatttattggagattctggattttcattaggtggattaacacttaaaaatggtaatgggaataatacaattaataataataatggaaaaattaataatacaccaacagtaccaccatcatatgagagtgcaataagtcaagttgcaagtgttggagatttaacaccagtttatgaaagaactggcagtggatattttaatagtaaagatgttggaggtggattacatttattagattctagattacaaagggttaaggataatgttgataaagagaatgagaatcctgttgaacaaagatttgagagaaggaaagttggatttttattgggttcaattaattcatcaccttcaatttctcgaaatatttcatcaaattcattgattggattaaatgaagagaatattaaaatgccaaaagctgcacatttttcggaattatgataagaattaatgatttaatgaatgaataagttaatgaatgaataagttttttatataaataattttcgaataaatagtttttataaataaataaataagtaagtctaatacagtgtacccacccacgtagggtacaaaaaatagcctggggaaaataattcggagtgtaacgcggcttaaaagtttagtattttcggagttgaagttgactgactgtgataaaataattttaaataccaactaaactattattcggtaacgagaatgaaattgatgcaatacctgtataccaaacgacaaacattgtaataattaagaataatggaaaaatacctaatttaactgagatagttaacggaatataaacaaatataccaaccattaaactaattatatgaaagaaaactgcgaatatcatatctgatttaacttttgaattattttccctttgaatttcaagtttaatttcttgaacagttttaattttattattattattattaggtttatctatatctataccgaatcttatatgtttggaagatgtaggtgatgaagttatcatatttaaactattaatatttattggagttattgttgaagattttaaatttgatctattaagtgttaaaatagttggatccatcatattattcaatgaagttacacttttactatttgtaaaatttttaaaattattagaagttaaatgtaaaacaggggatgaatttgaccttgacatatttgaatgaattggatatgagggtataagattttcatttaatattaatgaatttggtctaattttagttttactattattagttgaaattattgaagaatcagataatatacgttttgattttaattgagaatttctttgaattgaagcaatatcaactgatttcctattagatttttttaaattttcattgttattcctttttaaaggcttgattgaattaataaaatgagtgaaatgtctatgagttgatgaatgattgttattgttattattattattattattattatttagaggctgaaataaaggcttggaaaaattatcatgatcattaatattattatctatattatcataattagtatacgaggataagttttgaacacttctaaattcattcgttaaataaaacgatgatttttgggtattatgattagtattttgattataaaaatcattattatgattaagatgatgatcatcaacttcatcttcgtataaataatttagcgctcgttccgaattttggtggaaggagtttgaatttgaaattgagtgtctattagtaatattattattattcaaacgaggaagtattagtacggtattatcataatctgattgataattatctgaattgtcaatcaaagaaaaggaaggtgatgatgaagatttaatagattttttcgaaatattatccttttcataactattattattattattattattattattattattattatcgtgttttgaaagttttcttcttaattttttactattatttctcagcaattgaattggacctgtcattgaataaaaagagagaaatataaaagtagagaaagaaaagtcaaaagtgaataaagcaacataaaaatcaaatcaaaagaataaaaatagtatgaaatttgtgtcataataattcataatgaaaaaaataccttaaacagagcctatatattaaattaaacacgaaaataaaacaaattgtaaacaataggaaaataattccctcgcttacgtaacgataaaataaacttttaagacactgagcctccaaagaaataaattacccttttaggaaagtgagtttaaatttaacatgcattaaagatttattagggctattgatactattagatctattagaatgaattattatggatattagagaactttaatgtgaagggcaaaaaattaatttattttgattttaatttaatttaatttattttaatttagtttattttagtcaattcattttgcaggctcatcacttttttattatattttcttttattctacttttattcctattaaccagctgcttcatatatcatcattatggacatctggaacactcaaaatcatttattaaactcttcaaatacaggagcagctaattctgcttcaactgatcctttatcaactgcttatgataatactttacaaacttttacttcttcaataacttctccaaatgattataaatctaaattttcaaatgttgaaatggatcctctggcttatcaaatgttacaattatcaactaatgattcactttctcaattaacaacaccttcaatgatccaaaattcttattttacttctaatactaataataataataataataataataataataataacaataccaacaataattctaataaccaacatcattcattatctcataataatagtattacttcctctaataataaccttaattcaacttggtcaactaataataacattaataacaatagtaacaataactttaataacaacaacaacaattcttattcaaactatttaatccaacaatcccaaaatcaacaacaatctcaacatcaagctcaatcacaggctcaagcacaggctcaacttcaagcacaagctcaagttcaaaatactttcactaatcagatcaaactgaagatgaaacaacaacaaaatcaacaatcacagcaatctttatcattaaatcaagcacaaaatcaaaatctttcacaatctcaagttattaatcagtctcataataataattatatgaaccaacaatctcataataatcttaatattaatagtttccaatatgataaaattaaacctgatattattagtaataacaataataacattaacaataacattaataagaattttaacattaatcaatttgattcaagagctttaaaacaaaataaccaatttaaaaattcaattaataacaatgatccatctgaaattgaaaacttaaaaaataaacttcaactcaaagacattattatttcaaaattagaatctgaactggaaaaatcaaaagattttaaaaatacaattttaaaaactcaaaatgaatcaaatggtaaatttgaaattcctaaaaattatgaagatttatatcataaattagttgaaaaaattcaattaactgaaactgaattaactgaaactaaaacaagacttgaagctttaataactgcaatctcaatgaatccaaatccaacttcttttaaaaatggtagatatgatgaagaagaaatttctcataaaattatttcaaagcttaaaatgctaacagaagaaaatgatgaattatctagaatggttagttatgggaaatcaaaggaaaaagatattgaaattgctttattaagaaagcaaaatagtgatttattagagaaaatgtctaaattagaacaaaaaattgctgataagaaataatttacataataatatactctatttttctttgcttttattagaattttccataaacatatcatatttaaattcaagtttaaattcaaattcaaagtgaaaaaaaaccagaaaatctaatatataccataattgaaactctttatcactacaatttgatttttacaactataatacttaaaattactttgctcaaagttcaatcaaaacatttctattttcattttcatttttattttcattttactattttcattttccacttccctttttgccttttaactttatttttattacaactttaattacaaatgacatttaaatttctttattatttttcagtttcattttgaatgagaacattttttacaagttccattatgtaattgatttacaatcatattaatacatagaaattaaatatcatcaatattactattttccaaacctacaaacgcttgtaaacataaacatatccacttgtctcaatctcttttaaaatagattcaacagctaatacaactttttcatcattaaataaaacccatttctcaatcccttcaatttccttctttacaaatgcaacataatgaccagaatgaacagatgtacccttatgacaaataactcccatgagtgagtattcaccattcttaccattactttcctcttcaataacttttaatttatctacaccattttcatcaccatttgaaacttcaataactccattatcatcaggattattgaataaccattcaactgctgcttcaacattacctgaattaacaataagtgcctttgttgataataattcactgaatcccatattaattaaattatttaatttttcagaatcaacagaggcttgtttactgttttctttacttggagcaacaaatggtaattctatacttgcatcatccatatgttcaaataaccaattcattgcaggttcaatacctacattacctgtggcaaataatccgtgttttgctttatcttcagtgaatcccatttccataagattattaataaatgaaggattaaattgaatttcattatcatctttattttcctcatcttcaggtaatccagtctcaccagttaatatacctttacctttatattcatttaatgataaagattcggaaaatttaataggtacagcggctttggttgggacccagttatctaaaacaattctttgtgggtttattactaaataaggtgggaaagaatgaaatccttcaattttatttgcagtttgttttgatttacaatttggacaatcatagtcaaatgattcagctgaattccattgggataatgattcctccattgtcgtttgttgaaaattcttcacaccatcgtttccgatatcaataagttccatcttaattggaacagtaataacatcagttaattgttttctcaaacgtactccattacatttattacatttaatcttgttttcagtaataaatttcaatgaatctgttggcgattgatccaattgtccattaactttcctcttttcaagttgatcaattaaataagtccagaattcaaatgcatcttgttgtaacatagtactaaactcaggatgcccttcaccaatcaacgatttaaatccacttggtttaataccacgttgatatttaattatatcagttgtatcattatcaggaactgaatatcttcctgaatataaaccatcaccaattttgaacatttgtgtctctaaatcttcgtatggttttagattacccaatattttatccaacggtattccatcaggattgaaatatgcctttttaaatgattcaacactgaataatacttgtaatgccgatgctaaatagcatgaattacctaaatttttaaaacctgtaagtccttcgccaaaaattggtttacatgcttcatcattatctccagacattttaaaatcccattggatattttgttcaatttgtaattcagttaatgatttctcagttttaacaaaattagaaatatcgattccataagttttcaataatgaagctaaatttggtactttgacttcatcatcacatgaataacaataacaatctgctatatctgatgataatgaacctaatttaactgcaactgcatgatctggatgttctttttgatgtgccatggcatgcgaattaccagcaacaccaccaaactgacttctaccacatcctaaactaccacagtgtaaacaaatccataaattttcattaagttcacatgaattacattgtttaagttgtaagttttctatacatttttgtgtaattgatgatgaatgtttacaaggtttaatttcttgttcccatgatttgatttcttgtttcttttcgcttgatgtagcacgaattatcgcatctgctgcttgtgtaactttcaatggtaaatcaacattaggatattcgattgttgtatttgtattggatagataaattgaagttttcaaatcaaataaatcatcatcagatgattctttaatttcaagtttaaccattttcaaaggttgttcatcgtctctattaattggctttttaactttcttgtaattaaggtatgtattatgaccataaaattcactatgcatttcggtataatgaaattcaccacgtgaaaatgcttgatgacatgtcatacagatgtctaatccatttatatcataagctgtatcaaatgaaaacatacaatcatctttaaaaactttagatgatgcattaggtacgttaattgagttaaggtctatatcaaatgatgccatttggctttagtggaaaacatcaaaggcaaattctataagcattaacatgaaattccaataataagcataattttttctgtaattttcatgtgagtgagttaacgccggatcggatataagaaaataggaagtctatttgaaagttgtaactttacttttaagcagaatttctttttaaaaaacagggtattatacattattatatagcaaaggctaataaaaactaaaatcaatgaagtattatctataatattatgacagaaaaattatatcatcatctatcatgttctctttttttggtggaacgacccacatcacttcatcatccgtattttcagccaacatgatttcactaccgtcaaagtttgatggtagactgatacgatcagcgtgaacctgcgaattttttttaagttcaatatcttctctggtaaccgttaatggggttgtggttgtagtgtttttgggatctaatggtagctttatatcattttgtgcatgactttcttctgtattagtagattgatctttaacttcatctaaaacattagtgaggtccaatggtttaccttgctcaactttcacaaatttattttcttccgtttttttgataggtgtaagcagatctatctccagggtacctacatcggataccgacgtttcagtgtctgagtcgataatataaacctcaccattttgtgatgcatttatgagaggcttttcctcttcttctttgatactatgtgatttgtcattctcaacaataccaccaaacaaaatttccattgatccatgtgttgaaaatgtatcatctgaataatccgctgcagtagtttcaattacttttctctgagtgacattttccttctggtttctttccgtttcttctctaataattttatcttctggaaaaagtatatccattgtatcattggatgaaaatgtgtcattttcataatcatcaaggtttcttttgaaaggatctgtgcttatcactgcactaattttatccgcttttttatctaatgattctcctggaacagtagggagtcgagtcatagaatccatcaaactgatattacgagtgactgccattttggaatgttcttttttttctttcacacgttcactatttagttgtggtttaatttcaggactctcaagcttttcaagtagcaatgttggttcaactttatcaacttgtttggcatctttataaaattcattaaaatcattatcgtcaatgaaagaggatccaacgtaatctgaagtatctaaaatacgagaaacttcggcatcttcttcaaaaggttctttcaaaattgcagtatttggagtatctgttgtctttatagactccatcgtttttactctctttttaggagatccagcggcacattcaaagtttcttttgttagtttcaacaatagaagccccagacatctccaaaagattgctattatgtgttgatataattttgattggcgatttcgaatatgttgccagtacatccaaagtagacttttgagttggtgtttttttcttaggtggtgtacttttgggtgtcttcttaggtggtgtacttttgggtgtcttcttaggtggtgacttactaatcaaatatctctcaaaaatttctctaccatttttttctatctcaaaataatatcttggtagccaaacatgttttatttcatcatccatcttgtttaaattctcatctagaggactatcagataactttaatacctttttaaagattttccgtggaacaaattttaactgataaagtgtttcaatctcgttactgttgtttaattcaacagttttctctgttttgataaaaaaatcggtttcctttaaatccattaaatcagataaaatgatacctctccaaaaataaacagttcctaagacatcagctaaatattccatttctttctttttatttttagccgtttgcatccattttaataatgttttatattttagtctatcaatccagttgataggttcagcagtctggttctcaattagtactgtattcaacttcaaagtttggaaattcagaattgactttccaatcattttatttttattatttccacgctttattattaaattaccatttcctgtattatcagctattattgacaatggttgtggaagaataggtattttcaaagtttccatcgataatttaccatcagggttagcaatccccgtactaaactgatcacttataaaaagactttcagcaaaaagtggataataatgacttgcaataataaaatcacttggtaatttgacttctgagttatatactttcgtaagaagatctcttccatgattttttaggaaatcagttaaatttttttcaaaccttctcaataattcaagacgtgtttgtcgatcatagggtaatttaccttgtaaaatttttttgggatcatttgaaacataaatagatttgaaagttttaaccgcatcgaatatagaagttaagttggatgtcgccaaagcccacgcttttttgatacccagtccttttgcaccattagaatagtcgtccccttgtaaacatgcaataaacattatcttatcagcatctaaattcacttttttgataatgttagaatcaacaggtgtgatattataatcagttgtctttgatgatgcatgatcagattttgttgaactggcaggtaagtcttttgtaaatttagagaaatttcgtaaaaccactaaagctccataagcaaaagagtctgcatcatttgatattattgcatcaattacacctgaaacatttagtcgtgccaactctgtttctgcatcaccaggtgcatgaataaaacttatattccatgcctcgagtaattcaactagagcacaaacacacttttgcctgtttatatgtctattgttctctattttcttcttgttatctttataataagcttcaaaaatacgtttatcagtattgtgatcaatcagccctgaacttattttcttacgatttttctctaatttgattgtaccatcaaacacgataacaaaatttacgttttgttgaatcatgtatcttagtttactagcaattccggaaacaactgcatgtatttctgtatcagcttctggcatattatcaccattagtactaacattagaagagtgttcgaaaatccattgaaatatatcaataccaacagttaaaaaccgtccgtgttttcgataatgccgatttgcatattcagggaaggaacatcgtattccttctaaaacctcaagggatttcaattccgaccaaaactcgggaatagtcatgctgtgatatctttatttttgtccaaaaaatattcactaaaggaagtagaatacggaaatgtaaatagaccaagttcaatcgccagatcctcggtgatggggctaactgtttgagaatttctaaaatttgaatttttgtgacagatcaccgatagctactttaagattcttttacttttaccttattacttttatttttcatttataaaataattttataatgtgtattctatctagaactaatattatatatacagcttaaaaaataacaataaacagaaaaaaccttacataacttcactaataactttagcagcttctttataggtatcaagaagtttttcacatttttctctttcttggattaatgtttcatcttcgtataataagtcatcaaacaatgattctttatataatttttgaactaattggttttgaacgctatccttggagtaattcacaagtaagcacataattgcttttggaacttgatctctaatagtttctctaacaattgagaaatatgatgcaattaatctacgaattaattcacattctaattgttctctttccgacagttgttcttcacttaaatggaattgttccagttggttttgaattgaactttcaacaggtaaatggaattgtaattgactactttcagtttcagttgggtagctaaatggtgcgatcttattatcactttcagttggatgagattcatcttttttaccaaagaaataattaaggaaattttccttttcaggtttggaacctgaggttgaatctgttgtaccattagcggtatggttttctttgagctcactcaatatagaagactccttcaattcattatgtaaatgagatgcagcagcaggaagcaagcagccttcgctattctaccattacctgaaccacttgattgagattcagttcttgaatgtgctgtttgctgttgtatgtgtattgattcttcttctttctttaaaagttttattttttcattttgtttttgcttttgtctttcttcagcaacttcagccattgcatttgctgcaccaacaaaatttggatggttggtatttatataggcacgattaatttcaattaaactttcaacatatttagttgttggacctaatctttctcttaataattcagatacaacttcaatcagttttgtgtgcagttttggatatctagctaattcctggctaccacaattatgacaaattttcattaattcttcataaactaattcaacacatctatgagaaggtccctctaataattgaatttgaggtttgactaataaatcaaatgccaattcaggaacaaacaatgatggtcttggaccagttgagtttctaatagcggttctaatatctataacggttaagttttgtaaagggttgattgacatcattgaattacctaaaacctcattgtaaatgtagtatattctagcaccaccacataattctttagttgagatttcacttgaattaccttctattgagttgatgaagttattagcaaatttattcatcagctgtaaaattaaaccacctctattttcttttgaaatgatgtttaagtttccatatgaagctaattcttgttcagtttgtcccataagggtgttcaatttagccttaatatctggtaaacgttctctaatatgattcatcaaagttttattcaaagttttagccaaatattcggtaccacatctattagaaattgtcttataggcaggatgagagttgaagaattccatttctgctgctaatgattcatctaatgatttacgttgattaatatcttgttgagatctattaaccacaccgataaaccctaattttaatggatagactttaccagttaatatatctaaagcattagttccatgatccattaaatctaatttagataaaataccaatagttcttttaccttgagggtcaacttgtcttgctagtttcaatgcttcagagttaactaaatcttgattcgcaggtgtaacagctaaaataatagagtttggttttgaaatatattctaacaataaattcttgatttgtctttcaatatcaacaggttgatcatgcaattggaatttttgttaaacctggtaaatcaaccaatgttaaatttaaaacatttggtgaataaatcttaagattaattggaattctactgatacctttattaattccggcaattctagaagtttcattttcaatttcttttctaatattttcaaaattatagaatctcttacctggaatgtgtaaaaattcaccccattcttcagcaggagttggaggtgaaatttcattaacattagaagagctattgtgatttctgagatgttgctctaatgtcatttcatttggatcaattggggcttcatctgaaataaaatcagatttatgtaataatgggtcatttgccgcaacatgaattaattgtaaaatcaaaggtcttctagtgacaatacctgtacctcttgggagaaaatctttaccaacaatattctctaatacggaagatttaccagcagattgggaaccaataactgtcaataggggcaagtcaagatctgtcaaggaagtattggtgacaatatcctgaagtttattgacaattggaatcaagtcgtgaagagaagccatctttaaattatatgatgccttcagtctataataattcacttgaagaattggaagaagaaccaacaaattgaaataaatggatgttgttgatttgctagtttttgttatggtttcacttgatgtaacttttcacctccccaatatttactttttgattacgtaatattttcatgaatgtgatcttgatctacaccaatctgactgcttggtatctgatatatacatgtttaattgttggttacaatgaatgattcttgataaaattttaataatattctttcaaaaagattgaatatatagagaggagtatacatagtacagaaaaaagacaaacaaattttcaaattgtagtagtattaggggtaagcagtagtagtagttctagtttttggatgatagtttgtaagtgtagtgtatggtgttgcaccaggaggacaagcaacattacagatatcacgtactgatggttgatctgttctataccaagctggttttgtctccccccacttgtcaactagactaagtatatatctacgtggacctgagaaataacgtgcatacatttggatacgtgctaagtttggataaggacaatacaaataattgaaaacaaatggataagttgttgtaattggtaagtcccaaaagccacgtttttcaaaatgtgaatcaagttgtgaaagagcatcacttgtacttaaaaattcttcaaatgtaatatctgtagcaggattgaattcagtttcatcataaataggttcaagtgtatgatcaagtaaaatattatttccactggcatttgtagtctcattatgataaatttttctaaatcccaataggaggattattgaattccttaagtatttcatccttatcaaagattgaatcgtcaaaatcttcgattttgtagaatgaagtgaccattgactttggattttcagattttgtaacataaactgttgatagagtagattctagggtattagttggaatcaaatcatcaatatcattggctgcagctaatgaaacaacagaactgaggaaaaataatttttgtaagtctaatctcatattaattttggtttgttgtagcaagaagacaattaaacttgttaggactttgctattcattggcttatcatatccttttatatatcttttaagcatagatagatgaaacatgagtattttgtttcagaaaagtagttgatgtttccaaaatgtttctttttaaatacagtatcaaattctgtcctttgctttctaaattaggaaaatttcaatatttttataatttaacaactactttatgatgttgttttagccttcaacttcttctttgatctgacacacatcaaagtgtttattaacagccaccggtttgttcttttggtcaatatttccattgtttgacaattttgaatctacttcatatattctttttcggcctttccattcacccttaataaaaatcggtttgataaatgatagatctaaaatctcatcatataaaagattccaatcactcttatcggaataatccttactggtgattagttctgtaaattgtttcagatgatttgctgtaacgtaagaatatttaccaattgtattatttgtttcgatatttccttttatacctataagtccgacaacagcaccaaatctaaactcctgtctgattgctaattcttgccaatatcttttacaattcaatttctttgctcttccttccacaacaatatgttctaaaaatctacctttaggatcatcaggtaataatggaatattgtatattgcttgacttagatcaccactaactgatccatcgtaaacattgccaactttccaatccttactattcaaggggaaatatctctggatttctctatcatccatgttcaaaacatctaaatatttttcacaactattccaaccattactgatattctctgtatttttaagccaccatttcaatagatttgttccatctaatacatgcttgttttcatttttcactgattctggaaaaatatactgaccttctgctcttgtaaacaaaaccaatttcgtctcaataataaacttgtcagaaaaatatttatctgaaaagcccaatttattaagatattcaattccagtaatgtgtttattaggcacatgcttatcaattatatcaggttttgccaaaaggtaaagttttttctgagtttcagataaaaatattggaccattatacgaacttttttcattgtttttgggactatcttcttcatcactgtcaatatcatgattgtcaagttgttctttattaattttactttcatcaatgttcaattgacccattatttctttgattgggaataccagcaacataatttaaatactctgttacaaatccaccgacattaacgacgtcagaactggataaccctgaagtatctgcttttccaacataaattaacctttcaactctctcacctccatcattcatatgaaagttcaagtatgtgtatatttctaatgctaaaagtggtattttttcaggagagaaaagaatacaatagtgtgttgtttttgttgaaaacttaggttttaaacttttaggtttatgtattattgatacacatctttttgtattagtgacattaaaaaccacgtaattatcatttgattgataacaagatctaccaaatggttccattgctattcattatagacaaaggtttttcaaaagaagaatcaattgatcatggtttcaacaataaattttgaatgttgatgttctcgaatagattcaaatttcatgttggtgttttacgtacggcgtgttccactaggagatcgattccacttattattacaaatttcgcatttactaattgcattgtatttaatagaaatagatatacatattgtcgaaatataccctttaaatatactctataagttttcgtattcttctggataaaatatgagtctttcaataccttcctttgttaagacaatcattctgataacaccaccagaggaaccatcccatctaattgcttgtgataatgagttcttaataaaatcctacagtttcatccttagtcatattcttcttataatttttcttacagtaaccatacacgaaaattgaacctgaaccaccaagtatataatcttgtttatgtaaagaaccaccaattggaatgttatagacttcaccaccatttttttcatcataacctgcacaaataatacctgcacttaaaccatctttatttgaataacatatttcttggaaaactgaagctgcaaggatgagttgttggatttttaccatttgttgatttgtacatgtcaagatgatatttaacaatatcggcaactgcctgcgtatcagctgcagatccagatctacaacaccatattttatcttgaatttgcgttaatttatctgtaactctgtttgcaatatatgtaccagtagttgttcttgaatctgccccgagaatgactccgtctttaaaggtaactgccataatggaagttcccattgaaacttcaccctttttgaggtgtgtaatgtcaacattaataccgtccatctttgataatagaactagttaattgaataatgaaacaatttaattccaaataacaactctctcttaaagcaaaaggcttgccactcttaaaagagccaaattttgcccttgtaagtaattttccgactgtgagaaacagcagaatcctcggaaaatgtataggacacaaaagctggaaaatttccgattttttttttcattggaaattttcactttgatttctttcaacatgaatttttgtgaagtttttgaaagtttttaataaacctttgtttattgttactttacattctaaattaacatcaaacaaacaaccagacatgtctatgcctaaatttaacttactcggtcttacctctgttgaagatccatggggtccaaatgattacattccagaatctctcacttttaatggtgttccatatgcaccattcattaaaagtgataaattaggtaaaacttgcagattggcaagctccaaaggaagaagagtctttcaataactctgcatcaaatgcttattcatcccacagaaagagagatctttttcacgcttatggtgcatctgctgctaaattatttagtgctgaaactgaagaaaaaggttttagtttagttgatgctgttgcaccaccaactcaatcaattgctccaaagcaaactattttaagaagtaataagagacaaccaaataagggtcttaatgttaaaaaaaccgttgcttctcaacttactcaaaagaaaccatcatccttaccatcatccggtgctaatgcaaagaaacaaacatctaaatggggtgataataaatggaatgcaaataaatggaatcaagaagatacaaatacacaaaaagcttccattaatgttgaagaaagttggaaatctgttgctgaaattgaatttaataagttatcaaaattaaactttgaaattcaaaaacctgaacttttaattcgttgtggtactattcacaactatactagaaaatatgaagcagttggttcaattccattagaaccttgtatcaaagttgattttgaacaaactacttctaaagatcctaacatgcaaaaatatgcttccaactctgatgctgaagttttcataactgatgcgattattgctcaattaatgtgtactacaaaatcaaacaactcttgggatgttgttgttactaaaaaagatggtaaaattttcttcgacaaacgtgatgatactttcgttcttcctgttaatgaacattcaactccacttgatccagctaccgcttcagttattgaattagaagcaaatgaagtttctaactattttttaaatggtgcattaggtgaaagaacttcaaacttaggtgcagaatcaccaataaatgaatcttcagcaattccaaagggttatgcatactataaatatcatttaccaagttcagatgcttcatctgatcacaagggtcattcattaattgtccgttcatcattagatgcttttacaactactgctactacaaatgttgcgatccattcacttttacaagttaaaactaatgattggaaagtcaaattcaagaacggtgttcaaggtaatatgtttgctgatgaaatcaagaaaaacaataacaagatttctcaatggaccactaaggctgttttagctgaaatcaatcaaatgaagattggtttcattgcaagagataacatcaaaactgcaaaatcccattcagttgctggtttaatgtcataccctgtcgatgtcttatctgaacaacttaaattatcagtttcaaatggttggggaatctttaagtcattaattgaccttgttgaacatgaaggtggtgaagaaaactatagattcgtcattctcaaaactccaaatgctcaaaaactggccctttataaagttccttttgaatcatttgacttttaataaatttggaaccatctgaaaccttttcttatctttttaatacacgttagtaccatttttttataaaataaattaattgtttattaattacactatactatattttacactattttattgtaacacataccctactgtatctacatcattatgatcttctaacaggcgtactcgtatctattatttcttggtcaaatgaaccaaaaagaggtgccctactatacgtgttagaattattatccgtttcttcaacaatgttgttaagcggaataggttttcttaatccactgtataagttcattcgtatttccaaattccttttacgtacacgctcaactgatctagaagggaaagtagtaccatcattattattcaacacattggataatccagaattatatgacataggcgtacgaaagttggccaaagtggatgattcttcattaaatggagttctaagtaatgatcttgtatcatcatcatccactctttcttcaattgcatattgagaggagtcacccgttattaaagatctcattcttgatctcaaacgtggacgaaaaataggcgaacctcttgcttttggcgccaaatcaacatatggattaagatcaggtatggaagttgcatgttcagcatttggattttgaccctttcttgcagtgggtgttggagatttcctattttgtagctttaatctccatatttttaagaatatcagtttacgtgatttatcccaacgatcagtaaagtttttaatatttgattcagaggttcgaattttgatcaattttaactgaaatacagacatgcatttggttaatagttcaacattttgactgtctagttttgattggagaatatcatttatatccattacatgttcaaacttatcataccatatattatagtatttgaccaaaatgttcattttataagtatcatcagcttgttcttttaaaagttccatgtccttaattctgcttttaattttatatatgattttcaagctttgattgttttgatgttgcccaactcttcttattaattcatcatttctctcctttatagaatttgatttctgtttaaccaattcaaacatgcgatcaagtaacgatttgtcatttataatctgccttttcgatttaaattcatcggctttaagttttaaagcttctacaaccttgaacttatctttaaaactatcaaagtagatcgcttttattatctgcggaaataacgatgtacaattagccaagttttgttgtaaatccactgatttattgcgccatttttttaaatgattttgtaccaaagagatatccttttcttgttcgaagattattgttaatatcttcagcttccacagttttaaaatatttgccttgatccttttttcttgcatgtctttaaacttgttttctaaaattttaagtttgagtaatttaaagtatttgtctttcaatgttttttgttcaaatttctttgctttttggagtaacatcaatctggttttccattcttgaaaatgcgcctttttcagctgtaaagactttactttttcatgatttctagaaatatcgtccacttgttttatttgacataacttcaaaaatgtttttttgatcaaatttttattcaaaaaatacttaagcttgttttctatcctaattaaggcaacagacttctttattttatcaaagaacttgtgataaatgtaattatcggcttttttttcaacacgaaagcatatgtgccaaaatcggcttaacagtagtatcccatttagtaaaatactttttcattaatgaagttttcaaaaattgatctgcttttaaccatatcatttttcactttcaaggttttagaatgccattctaagaagtatatatattttcttttgagaataaacttttcttgaagtgctgggaatttagtcaacttacttgacattaacttattccatattctcttctttaatttttcacaatatatggtatcagctctgatcatcatcttttgattatttctatattgctccttcattttcataaatttatttcttaaaatcaatctcttaaagtctttttctctgttttcaatttcatcagacttagttttcaatttattaaaaatgaatgcttttctgatcaaacttagacttgaaacattaatatacattaaatctgaagccttttggtatttttttctccatacttcaaaatatgcctttttccgattcatttcccattcttttgatgcatcatacaattcttgtttctgtatagcaatatctttccaaatagtaaaatacttttcatatattcttaaatcttctttcacttgatacaaagccattctcatatgaagagttggaaatctgacgttttgatacatgtatggttttgcggttggaactaatgataaatcagttaattgtgaaacaaactgtttagtgtctattgatccatcaacccaatccattaccacttcttttatcaataatatgtacaaatcattttcaatatcgaaatcagattccccactatcttttaaactttttatgtaactggcaagtatcctactgaataagttcaaagtgacgggtatttctgttacataagtcttctagttccattttcgttacattctctaaaatttcaactaacattgcagagtccagagattttttctcattagcttctcctgccttttcaatcttattattattacttttttgttggtttaaggttttcaaagccaaatttcgatatatgggtttaagaattggaaaaatgggattatattgataatagttatcaatttcaatatcgacaaactcatgtttttgaaaaactcgtttaattatatctactattttattctggaattttagtataacatttggattaaaaaaataagcaacattgaagtcagccttgaatgtttgaagcattaacttcgccatatctggaattgagagaagctcttcatcatttactaatatatcaacagcttccatatagcacaagttaaatgtgctattatttgttttagatgtgattctcacggagtttgaaatatttagaacatcactttttaaatgtttaatgatcacatcgatcaatttagattcatctaatagttcttgaaccatactttcgtgtgagtataataaatatcgtattttgttgaacatagtgagtttgaaactaattgatgtttcctgagagttttcatctgtttgagaatctagtacagaaacatttttgtttgaatcttttactgagccgacagcttgatcagtgtttgaaatatcactattaatattcgacccaaagtaggcaatacctttgaaaacttcatcactgtttttaaaagttaattcaaacatatcgtaattcgatgaatcgaatgaagtgcccgatatacctaacagtaattgccataaatttttataatgtttgagaattgtaggatctggtgtatctccaggttctaaaactttctccgcttcatgaatctcatcaatgacatccactagcagatccactgcagacatccgactaaatgattatatacttgttgatagcccttgtttttaaccaaaagaaactgttgatgttaatagagaagagggattacaggaaattttaagcgagtacaaaatttgttcttatcatcataatgtataatctttcttttaattaaaatttactatttatacaaataactattacaacgtaaaatctacaattaaaaacacaatgtatttgaacattttgtgaaattaaattaatcagatcagatatttttcatgatatcatatttatcataatttgtttgaaattcagccttctgaatactttcttgctcttttgtttcaatacactttgtccaatgaattctatttttcaaatttagtaaaacagcaactacttttcttgggaattgtgcatcaaaaaatctattgtcatcattacccagttcgatcaagtattttgttataccttctttccgtaaatggtaaacaaaacataatcttgattatttataacttcattaagttcgtctaatttatcttcatttctgaactctcttacttttaaagactctggataaaaacgtttgtcatattcaatttggttatctaacacttttcggaaattaccaatcgccatatcctgtacaggaacaaattgaatatgaccatgaacactcctctttcgtgaaatttcccaaaagatgacagaataatcacccaaattttgaacatttcaaccaaactttcttgaaattgttggatttctttgaataaactagaatcttgaacttttaaagatgactccttgtttttaacatattctctcattgttgggaaatgttcaattggaacaatcattccatgacctgaaaatcctagaggtttaggtaaagttaagggacctttggaaactgtaagataagcatatttagctatagacacaatcatatgaagttcaaacttagggtttgataaacaaagaaaacatgattctggcgttatttctagcttcgtcttgtttgaaaagtttgatcttttcattgaactttcattttcattttcatttaattctaattttcttttctctccattgggtttatttattattggaggaggcgtagcatcaatagtttgattactgttcaaactgatgggaccaatttgaaaagcataccaacatctatcttcacccatagttgctaaacttatgaatctggtaattttaccatctttaacataaggtttcctttcaaaatattttccactttcaccaccacaagaaaaccagtattggggatttaattcagatattaaaatatccaatttgggatccccagataataacaaattttcttcccttgcaatagcatctggccataaatatgtcaccataatatcaatactttgacctttaaatttctcaaggatatcatttgatgtaatgtttttgagatttccgaaaacataacctatttttaaaccatttactagcttgtaaactccaatctctccaagatgtactaaattttcaggcaattcaatcttagaattatatccatgttctccttctgtaaaatatgttggaatattaacagttaaatcacctgattccacagaatctttagaaggaaagacatctcctaaaagtattgaaaaactgaacggtccagcttttttattttgttgattgattatatttatagcttttgatacatttttagttgatggattcagcaccaatacttttaccttttcgcctttcttcataaattatatctaatgctataaatgatgtatgtattcatagcaaaatacacatgtgttaatcattttacaaacaaattcttttctatcatgatccaagcttagaaaaattttagatactcaaataagcaagtgtgccgagaaatgtgtaaattaaacctttgaaaagcgtattatacgagaaatccaatatttgtatggagttttatactcgagtcataatctgtttttttttagatgtgtgcacttttttaaattcactttctgtgtaaaatggtaaattcatgttgggaaaatttaccaattgttagtttgagaattaattacgtcagcattattgttatcattattattattcttgtccgtcaagtcaatcagtaaactcctattacgacatattttagtatcaaaactatattaatataaaagaacctaaaaatcaaaatcaaaaatcaaaatgaaaattaaaagctggttaacacactattagcatttatgactacaaaacattctaaacaacaattctatcaatataatgtactgaatggtgaattgtaacgcgttgagttgatattttcagttaatatcggtgcaataatattatttggatcagtattaggatttcccttatgtttaaatgtaaaaccaacaaaattcttttgatcacccttaacactattttgtgcaatacgttcatcatgtgctctctttgctataacatctttatatttggccatatcagattcattttcaaaatcatcaaaataacctgcatcttcttcattatctaattgtggtataaatggtgggactgtatttctaagagtttcccagtttttaatatctgaaaaatatgccatttcagtaatttgtttgaatgatcttaatctatcattaggtgatgcaattaatcgggtgataaactgccatgttctatcactgaaaacatatctaccatcttcataacgtggtcttcttaaaacttgtttccaacgttttaaattaccatatgtttcatcagatgatccacctgaaaatggtgtatatccaacaatagtttcgaaaagcatacaacctaatgaccaataatcaacagtataatcatatgacttaccttccagtacctctaatgccatataatctggtgaaccaacaattgaatgtgcataatgaatatctttggaacgtaatgaacgatacattttttgacgttcactaactgaacgttctgttggtttatattctaaatctttaacttgatttaatctaagtttcattgattcaattctatctgttgaaatagtacctgccgccaaaccaaaatctgttaatttgatatgtccatttgcatcgattaagaaattttcaggctttaaatctctatgagtgaaacccaattgatgtaatgcattaacagcagcaaacatttcagatatataaaatcttgcatggaaaggatttaaataacctgcattgtttaataatgtacggaaatcaccacctggaacaaattccattgccatataaaggctttcagtatcttgaaatgcgtaaaataatttaactaaccaatctgatcttgtatttgttaaaatatctctttcagtaagcacatgtctagtttcatcacttctactcaatagtttcttattaagcacctttaatgcacatatttctttggtatctctttttcttgccagaaaaacttgtccataaccaccttgaccaacttgtgttataatatcaaaatctttatgttttggcttaattcttctttttctcagaaatgcacgttctcttccaatataatttctccattgcatttcagccttttcctttggtaaggttcttaatgaattttcaacttgttgaactctttgctttctgttaataacataatcaaataaatcacaatagtaatctaagaaatacatctgtgcagctgaaactaaacgttgagttttaggatcattgactttagcataaaactctttttcaggcctttgagttttcaaatatactactattgtagttattattgtaattatcattgctatgtgcattgaaaacattagatctagtaggtgattgacgtttagaaggtgaattatttggggtattttctttattaaattgagcataactatgttgtggacttctctctggtgagcatatttgcattgcagaatcatctgctgttgtatttacattatttcttccccttctaggacttgatggagtaccaaaattgaagactttcaacatctcttgataaatcatcaacatactgttcctcatccttagatgcacgactaaatataccaccaattaatgccattttcaagttagcttcaaatgactctctatttgattgatttcctttgataaacaaccagagatcctgactcaaataaagtaagtctattcacaattacaaggggtttaagttttgtgtgtcagaaggaaagagatcaacattcgcactgtttacattttccccttttaggtaatcaaataggatctcatattctattttgatctattctttctatctctactgtctctaactgtctactaatacattctattataattacacaagtttagctagtttactggaatattcatcattatcattatcagaattacgtcgttttctagtaaaactatcaatttttctctttagctcctttcgataattgcgatgatctaacattttcaacacctctaactgtattcttacctaacatacccaaaccaatttcttcaccaaatgcatccattctacttacctcttgttcaccaaacgccattttattttgtgctttttcgacttcagacattttcatacgatcacgcatttttttaaatcttttaccacctctcttctttgactttttatcctctggtatagctaatggtttaatagttagtgttctctggaggtagcatttgtttatctaatctttcctttatttcctctctccatttcagaacccatgctattgttattatttgtatttttattagaagaattataactttggtttattggcaaaatctactcttgcacacatcactaatttcgaacatacctgtctaatagcttgctttttaaaatcgtccacttatatctttaacaatatcacattgagtgatataaccctgtgaattattaaccgatttacctattgatggtatattacaagcaggggtggaacataaagtttctaatcccagtgaagcaagtaattgggcagtaactgatgatcctatcaatgcagtcatatttggcgcaattttttcagctctgtttgttatgaatgttttgaacttttgttgaatgttattgatatgtagtataatatcacaagcctctagtatcaattcttgattatgtgcgtttggtattgtataattctttgattttagaataaagttcaaagatatagttaatgagagtaactgatctttaggcaaaaaatcaaaatcaccatttgattgatgttccttgaatgacgtaaggttaaattgtaggttcttgatcatttttatgtagtatattggattcttcacgatattgataagatcaatccaaacagtgttatatcctattttaacaaatgtcattaaggtgtttaaatatttgtatatttctgttatcaattgatttgtttctgttagtaaatcatttacattgacagtgttgtttacgttaccatcttcagattcaaatgagtttaatttcttctccactttctctaacttatttaaaatggggcaataatcacgaatatttcgtattttcctctatatcagtttcggttagtaaatcttgaatatgtagtttttttgaagatgtagtattattcacatcaataaaattattattgttaccatcaatatcatcaatatcgtcaatattattgatatcttcctctacgtcaatagctgtatcagaatcataatctgagaagtcccccaataatgtatctgctaatcccatgtgtacttctctgctattatatccttcatctactctccctctatctttaataataaaccttcatgtaaaatattacctaaacaaaaattttataattccgtgcaccacagaaaaacataaatttttcaaccgctattttttttttcagtgtctcttcctctaagctttgactcattgaattttctctgttgaacattatatgaattttaaatttatgaaaatgattttgaatcttaatatttatactgtctttgacaactggtattcttttgtatacgcagctttcattgttgatatccccttatatctatatatttattattttaggcacaaagcccgtttatgttattggctaggtatttctataaaagatcaactgcctgcacacatttaaatttaaattatactaaaagacagatatctttgaaatttcatacattatcaactcaaatgtctgaagaaattaaacaacaacaacaacaaaaagcagctgcttcagcagcaacaacacctgttgaaggtggtgaagccgttccaaaagtaaagactgaaaaggaaattcaaaaggaaaaggctaaagctgaaaaaatggctaaatttttagcaaagaaagctaaacaagaacaacttgcaaagaactgctgcaaagaataaggaaaagaagaagaaagttgaaaaagttgaagctccagaatatgttgataaaactgttcctggtgaaaagaaagttttagtttcattagaagatccttcattctcctcttataatccaaaatcagtcgaatcatcatggtatgattggtgggtcaaggaaggcttctttgaaccagaatttactgaagatggtgaaatcaaaccagaaggtgttttctcaattccagcaccacctccaaatgttactggtgctttacatattggacatgcattaactgtctcaattcaagatgctcttattagatactatagaatgaagggtaaaactactttattccttccaggtttcgatcatgcaggtattgcaactcaatctgttgttgaaaaaaccgtttatgctaatgaaggtaaaactagacatgattatggtagagaagaatttataaagaaaatttgggaatggaaagaagtttaccactgcaaaaattaagaaccaattcaccaactatgggtgcatcttatgattggtcaaaggaagctttcactatggatccaactagaactgccggctgttaatgatgctttcgttaaattattcgatgatggtaccatttatagagatttaagattagttaattggtgtgttaaattaaataccgcattatctaatttagaagttgaaaataaaactgtttcaggtcatactttattatcagttccaggttatgatgaaaaagttgaatttggtgttttaactcattttgcttatccagttgttgattctgatgaaaaattagttgttgcaactactcgtcctgaaactattttcggtgatactggtgttgcagttcatccaaatgatgaaagatataaacatttacatggtaaatttgttgttcatccattcaatggtaaacatattccaattgttaccgattctgaagctgttgatatggaattcggtactggtgcggttaaaattactccaggtcatgataataacgattacaataccggtaagagagcaggtttagaatttgttaacatttttactgatgatggtaaattaaatgaaaattgtggtgaataccaaggtttaaagagattcgatgctagaaaagttgttattgaacaattaaaagcaaagggtttattaattgatcaagaaggtcatgaaatgacattaccaatttgttcaagatctggtgatattattgaaccatacttaaaacctcaatggtgggtttctcaaaaggaaatggcacaagctgcaagtgattctgttaaaaatggtgatttaaagattgttccagaaacttccgaaaaggaattccacagatggatggaaaatattcaagattggtgtatctcaagacaattatggtggggtcacagatgtcctgtttattttgttaaaattgaaggtgaagaaagggatactaatgattccaaaaactgggttgctggtagaactcttgaagaagctcaagctaaggcagataaattatatgctggtaagaactttactttagaacaagatgaagatgttttagatacttggttctcagcaggtttatggccaatgtctactcttggatggccagataaaactgttgattttgctaaattctatccaatgtctatgttagaaacctggttgggatattttattcttctgggttgctagaatggttatgcttggtttaaaattaactggtgaagttccatttaaagaggttttctgtcactcattagtcagagatgctcaaggtagaaagatgtctaaatctttaggtaatgttattgatccaagtgatgttatttctggtattactttagagaatttacatgcattattattaaagggtaatttagatccaagagaagttgaaaaggctaaacaaggtcaaaaggaatcattatccagatggtattccacaatgtggtactgatgcattaagatttgcattatgtgcttacacaactggtggtagagatattaatttagatattttaagagttgcaggttaccgtaaattctgtaacaaaattttccaagcaactaaattcgttttaatgagattaggcgaagattatgttccacctgcaaaagctggtttatcaggtaatgaatcattagttgaaaaatggattttacataaattaactaaaactactgaaaaggttaatgcatcattagaacaaagagatttctatgaaacaactcaagcaatctacaatttctggttatatgatctttgtgatgtttatattgaaaattctaaattcttaattttggaaggtactgatgctcaaaagaaatctgcaagagatactttatacacatgtatcgatggtgcattaagattaattcatccattcatgccatatatttccgaagaaatgtggcaaagattaccaaagagatcaaccgaaactagtaaaactattgttaaggctaaatatcctgaatatgttgctgaatatgataacgttgaagctgttaatgcttatgaattagttttagaaattactaagggtgctagatcattattagcacaatacggtattactaaaaacggtagtgttttcattgaatcatccaacagtaaattctttgaaattgcagaatctcaaaaagattccattgtttcattaattaaagcagtcgagaaagttgaagttgtatcttctgcatctgaaattccatctggttgtgttttaggttctgtggttccagaagttaatgttcatttattagttaaaggtatgattgatattgatagtgaagtttctaaattccaatctaaattagaaaaatctaagaaatcattagcaggtttagaaaaaattatgagttcatctgattacgaatcctaaggcatctgattctgcaaaggaaaagaaccaacaatctaaggaaaagacaattgctgatatcgaaggttttgaacaaactattgctaacttagaaaaacttaagttataagtataacttcaaatttatttaaagctttttcataaatacactgtgtacatatttcaaattatcttttttaaattatcatatataagaattattcacaaatttaatataaattattaattattaatagaatctaaaatttccaaatataatcattaacaacaccttgtaagataggtttctctaactgattcattaattttattaatatcattagatatcacatcaaggactttaaataattcatcttctgtagttttaccctaatgagtcactataaattaattcatctgatttaccatcaacaattgagaaaacactaacatgatgagatgtagaaaaatctaattcattcattctcggacgtacaattatattgccatctttacaagcacagaatgaacttaaaaaactagcctttaatgatatacctgcatttaataatgctaaatataaggaattaacagcgcatgataattccatacaagtaaattgttcacgttcaccagattctaatatttgaacaactatttgaatttctgttgaagcatattgttccatattaatcattggagtaataattttctttaatttagtttcaaggtatgattctctagttgatggtaaaccactagcgggacgaacgcatatacttaaaaatgcagttgttggttcctcattacgttgtctgataacatttattggacctgttactgatgatatcactttggttgaatctatttggaaagtagcagagccatctacctgtttcaatatattttgttctgatgtgatagccattgtagatttgttgatgttccttagttgactaaactctctaaagataaatcacaaagtcagaagaaccaacatttcaaatttggttacatgaagaatttttcaaattaccgtattgggtaaagaaaagtttttcaaaaatatttttttttctttgaatttcagtactacttttctttcattgaacaacaacccattgaaatgcttccagaattacaaaatattattccttatatccaggaagataaacttaatgatgtctcactaactttattattagaattaatcagcaatccatcaattatcaatgaatcatcaaatgttgatcaacagattcttgttacgagagttattacattattaaaatctaatcattcaattactcgttggaaggctacaaaattattaactgtttgtcttttacatccagttttattattatcatctaatactgcaaatgctattgctgcattagttaagattctagaatctaaatgttttattgcaaattatgaaaacccaacagaaaaggaacttattactttaaagagtgcaactgaatgtttagattttgtgattgaaaaaatcagaggtaaaccaacattaactagagaagttttaacaccaaaattagctggtattatttcttcattaattgatgttatttcattagttcctgaatattcattaaaagttttaattcaattattagttttcaatacaactacatttagaccatttggtatgaaatttgaaaatgcattaaagagaattttaaatgatggtgaaaatttaaataaattaagtcctgagttacgttcattaataatgaaatcattagcatatgtttcatttattttatcaagagagaaacaatcagaagtatggaaagacaatgttaataatattgttttagaattgaaatcagttatttcaatttatgaagcatgtttagaattatcaaatgattcagattataatgataaatttcatcaattacctaaactaccagaaaatttaagctcaatgaatttcatatttaacacattatcaattgatattaatgaatcgccaattgaaattttcaaagtttcacaaagaattgaagtattaactgaattattattatcatatattgaaattaattcaccaactgcagtttcaattccatttggtcatttaatattaattggacaaattttaacaagttttaatacaaatttcacacctgttaaaagtgatattcgtgatatttcaacacgtaatatgattgaaaaatcagttattcaaagtaaattatcaggtatcaaaattttaaattcattaattaataaatttcaatttgaaatgtatccacatatttataaaattttagcaattttagatgcgtcaattccagttaagactattaatggtaaaattaaagttgatgaaactggtatttatgaaaatgaaggattaattattaatattttagaaactgcaactgaatatttaaagatttgtgaaagattcaatgatatgacaattttaggtagattagttgaatcatcattgatcttaaaagaagctagagaaccaaatgttccaactgataagattaatacatctaataccaactctaattcacgtaataagaaacaatcaaagagtaaaaccgttgtttcattatctgatttattatcccataaacaattatttattaatcaaccaaatattagtacattattaacaattagaaaattcttcaatatattaattactaaatgtgaattatcacctggtaaaatttcacagattgttagatttgcaatattagattcaatttgtaatattgaattaattaatgaaggtaaagttactaatgaaaataaggaaattattgaattattagaaagtattttattattcccaggtaaatcatccacaagtatttctgttattccaatgatttccaacttaattggatctaatagtcgtatctatacattattagttaatccaagattcccattattaccaaagaaaataaacgattataatgcagaactagaaaaggaagaaattgaagaagaggaaacattagaggaagaagcattacataatggaacattccaaatacctgaagttacagagaaaagaccagttgaagaaattgaacaagaagaaagagaaaataagagacaaaaagttgataatattagtgaaaaattaacaactgaaggaaatggatttgtatttaatgaagaatcagagagtgcaactgaagcattaaaggaaatgaaacgtgaattagaaaaggaaaaagcaactggatcatcattaagtgataagattatcgaaagtgctgaagttgcagaagataataatatggttatctctgaagttgatgcagaggaggatgaagatgatgatatggaatctgattttgagatgccagttattaatgttgatgatgattaagtcttaggaaaaggaacagtttcataactacttttttttactaaatgtaagctctaatattataataatgtataatatcaaaattcgtacaaactatcagtgagtaattatattcataacaataataataactgataatctgttgtttccaaagctcacaatgaaattgattgatctagcataagtcaatacagataacaaagaaattagagtcctaataagacacaccaattgaaatccaccttagacctgccaaaagagtagtaaaagaattttcgtaaaaagaatgaaaactacaatagaatgagtaataaccaaccatagttaaatgaaggatcagaatgtacgataaagcgtcgtttatagtaacaagaattttgtgccaaacgctgtcactcataccgtcccagataccacaaggatatcatttcccaccgttaagaaggaggaacgccgagtgtgtcaacagacaacacctagttttcatcataatagtaaaaaactaggaaggtcatactgctgaaaggaaagaaagtagtgataattggaaatggttgaaaaagtgggaaaataggttccttttatagtgagggttcccgacattggaaaatttcaaaaaaaaaatatttttatttttcactgcaaaaaaattttattttattttaacatcagattcagggtttgtcttggatttggagttagaaagttaagcatatacacaatggcaaagaagggaaagagtgtagtgaataagaagaaaatagttgacactaagtcattactttctgttaaggagattgaatcaattaagtcaagtatattggaatctcctaaaaattataatcaaattatcaaacttttaaatgcatttgatgaagttgtaaataaagtatcatctgatgaagatgaagaattggatactgaatatttgaaatattccagaactctgcttttcaatttatctacacttttcaataatttaataagtaaaagaattttaaaattaagaaaatcacaaactgatgaggaacaattagtttgtaaatggatgatatcaaaatataatactttcattaatcaaatattcacattatggaaaataaataagttttctcaaagtttagcaacattgaaaattgatgcattggagaaaataatgcaatttattaaatatgaaagtaaatatcttggaccaaatattggtgaatcatattttgcaaatgtaacttataagaaaatattgaaaaatttattatgttatggtgatttatcacaaataaatggaaatgatggtgcaataaatgattatttattattagaatttcaagaattatattttgaaaaatattgggatttaagattttaccttttccaagaattaccaaatattttaaatgaatctgatgaattaaatgaagaaactgaaagaattatattttccaaacttttaacattagttaagaaaaatccagtttatgatatcaatgataaacaaaatataacagaattaccattatttattaaaaatgcaccagaaaatacaatatatagtgttaatacttttaataataattttgagaaaacatggattaatatattaaatttaaaaggattgaaagaggaagaatataaatcaattttaacaattttacataagagaattataccatttttcggtaatgcacaaaaattaatggatttccttacattaacatatagtattggaattgagaataataatgatataattttatcaattttatcattaaatggattatgggaattaatgaaatcatataatttagaatatccatcattttatacaaatttatatgcaattttaacaccaaatttattacatttaaaggaaaaatcaagatttttcagattattagaattatttatgtcatcaactcatttacctgcatcaattgttgcatcatttattaaaagattatcaagattatcattaacatcaccaccatcaggaattgttattataataccttttatttataatttaataaaaaaatataatcattcaacatgtatgttattaattcattcaacaacaacaaatgaagaagatttaaagtatattgatccatttgatgaaaatgagaaagatccatcattaacaaatgcaattgattcatcaatttgggaattaaatagtatggttaatcattatcatccaaatgttagtgcattagttaaaattttttatcaatttttcaataaatttagttataatttagaagatttccttgattggaattataataaattattagaaactgaatttaataaaaaattaaagggtgaaattggtttagaatttgagaaatgggatagtatgtttgatgataatggttatatggaagattatctttattaataaattgatatattagaatggatattttttaaataaattaatgaaaaattcataacaaaataaacttataccagttgctggagcacttttcaataaagctggtaataaaccacgatataaacctttaaaaccatttaattttataacattttgtaaagtaattaaccaattagtattattaatttgaattctacgtttaattaaatccattggataaactaaagttttagaaattatacctgctgaaatacctgcaattgaagttataccaccaatattattaattaattcattaattggtgaataattaattaatttataattatttataataaaagaatatgaactaaatgataaacctgtattaattgtaacataaaacatactaattgaagcaccagtgaaaaatcctattataccattatttgaataaattaatttacattcctttaataatgatttaaaattatgtttatcatttgatgcaagtcttgtacgtaataaatctaatggataagaaacagttgttgcaaagcaacctgataaaccaccaataaataaatttttcaatgttggatttaaagttaaattgatatgatttgttaatgttgtaaaagcccaaaattgtgaagcaccataaacaatatacattaattctgcaggtgtattacctttccagaatgcattaataccttcatttaaataaattgatctaattgttgaagtaattgaattatatttaattggatcattaaataattgtaatctaattttaattatatcaattggagcaatacaaaatcttacaattaaaccagataatgcaccagcagttacatgacattgatttagaaatctcattatgtgattcaataaatgatttcttattgttgttcattgtcccaaaaggaatgaagtttgtaaggaagaagttaaggaaaaaaattattatacactgagatttctatacacaaaatatactagtaactaaattattcatttgattgttgaaataatattgcatttaaagtttcatcatcaacagtaccttgaaaaatagataaaggtatatcctttaaaccagtttttaattaaattattatcagatattaaagtatcaattttaattttattatcaaatgaatcaccaattttaataaattttgaatttgttgattgagttattgaaggtgtaaaatttaaatttgtataaatatccttttgaactcttttattaagtaattcatttctatcaaataataacattgaatcaaattgacgacatttaagtgaatgatcataaatccaagaattttcagtttcaagtattgaagatttcgttattggatttgaaatgtctattgtagtggtgattgtaggatttgggattgttgtattagtagttgattctacattttgatcataagtaatcatcaataccaggtttaccattaataattaatctatgaccaaattctttaaatgcagatctagcagttataagataagccggtctagttttaaaagaatttggtaaataatcatcattaattaaagttaatttagtttcatcatcgattgtaaatctaaataaattagtatgtttttggaaaaggaaataagaatctctataaccaactaatctagcaacatcagttgaaattgaatatttaatatttgaattatcatttggtaaagtaaaagttttcattttaaattttttattaattaataaatcaccaaatttatttatttttaaatcaccatttggattatttggagtttgatattcattattaattacttccatgttggtatctttatttgtttcatcatcatcatcatcattatcaatatccatttcatcatcattatcatttatatcattatcattatcatttatatcattttcattatattcataatctatatcaggagaggcagttctacgagatgaacgaggtggcattgttaacaagttagatgtggaattgataaaagtgtttattccaattgaaataaatatccatttcaatatatataagaaaccctgatattatatactaaattatcaacactattaaattttattacttattacttactaaatacgcgcttttcctataatattagtattttaccctatgtatgaaaaagttttttctttcatttaataccaactctttctttcttacttcttttaacaatttgattaccacagggcttgtaaatgtacaattataaatatttattataccgaagatataaataaatgtgataatttgtattggttttcaatacttttaattatcaattaaagcatttattataatttttaatgataataaatagtacatttcttaaatcatttgatctacaggtaccaagaacgaataacctgaattttcgctgtttaattagtttattatttacattaaacagcttcatgcttaggtgatatttattttataattgtagtatgtagtatgtaattgtagtgtattattctattctaattacgtaatataaaaacaaagaaaatataaaaatataaaaatacagtcccatcgacccttaacataataaaataacgtcacgtgaccattacggaatcaatctatactaattcaatacaccgcggttaaatccccctatataataacactctacatagtaaatacgtaaatggacaagtagtaattcaattacatgatttattgttattatgtagtattaggctgatataaggtgtagaatattctcatcactacactcttcttcttaaaatcaaatagtgtatatgtatattatagtgtaagtatagtataagtatagtatagtataataactataaataaccctcatttactcaattactctctcattattggctaatggatttttatcaaaaaaatttcaatcttttttcatcgttgttaattataattactattttattgttattatttcaacttctatttctatttctatttctatttcttcataagacattcatcataatattcatatagcatataatcataaacacccacttatacaatggaacaagattttatagataatcaattatcagttaatttagattcaactgatgcatttgaaggtcctgaaaaattattagaattatggtttgctccaaatgaatttactttaccattttcaatttggaataataaatctttatttgatataccttatattgaaattgaaaatttattaaataatgttaattgtcaaattttatctcataaaagaaataattttattcatgcttatcttttaagtgaatcttcattatttatatttaaacataaacttatattgaaaacttgtggtacaacaacaactttactttcattagaaaaattattaaatattttgaaaactttcataaataataaattaactgaattaccaattttcacagttttctattctcatcgttcatttatgttccctgaaaagcaattattaatgcatcaaagttgggatgatgaattaaatcatttgaaataaattttttaaaattgaaaattcaaaagattttattttcggtaatgatattaaaaataaatggcatttttatgttaataaaggtaatgataaacttttccctcaaataaattcaacaaatgatattacaatagaaattttaatgacaggtttgaaaaatgttaatattttttatagaaatgaaaaaggtattgatggtcatattaatggaattaaaatgatggaaatttctaaatttaataaaattttaccattagatgatatgattcatgatgcatttgcatttatgccatgtggttattcatcaaattctataaaggatgatatttatacaacaattcatataactcccgagagtgaattttcttatgcatcatttgaaactaattatccaattaatgatgaagaaactttaaataatataattaataatgtaattgatgcattaaaacctgaacaatatactgtaactgtatgttatgaaggtattaaaagagaatatttatcaaataaattaaataatcataatcaaacagatattgatgtatctcatggttatcgtgtattatgtgcagaatttttataataataatagttaataaattttatagtgatcgcgattttaagttgcattattattataattcccttgcatattgcattaagtcttcaataataagattataatctattacaatttccttttatgggcaatgcacaagggtaatcaatttattggtaatgttaatggtaatcatcattatgatgataattatgtaagtaataatggaaataataataggaataataacagcataacatcttcaccaccacatcaatcaaatgatgatcaattaaattcatcaaataaacaattttattaccttccacatgatcttaattatcaaacttattatcaatatggtagatatgttccatcttattcaaataatcctcaatatagatttcaacatcaacctcaacataatatccctcaacaatatcaacaacaacaaagtcaaggccctcaaggacaaccattagatcatcaacaacatgttcagcaattacctccacaacaacaatcaattcaacaatctactcaacatcctcctccacctcatcaacaacaacaatttcatcatccacatcaacatcaacatcaacatcaacaataccatcatccacatcaacatcctcaaatgcaacaacaacaatttcaacatcaacaacatcaacaacatcaacaacagcaacaacagcaacaacagcaacatcaacagcaacaacaggcttcaattgcaacaacagcaacagcaacaaatgcttcatcaacaacatcataatcaatcacaacaacaacaacaacaacctcctcctcattatataccaatagcaatgccatcactttcaatgcctgttaaatatcctcaatcaccaccaaataatatccatccactttatcaacaacaacaacgtcctcatcaacatccccattatcaacacccacatcaacaacaacaacaacatattcaacatcagcatcaacaacaccaacaacacccacacccacacccacacccacacccacacaacaacaacaacaacaacaattatcaaaatcaagatttcaattaaatccattagctggacaaattcaaccaccaggttcaagaccaaaaatcacaacaacaatgtgggaagatgagaaaactttatgttatcaagttgaagcaaataatgtttcagttgttagacgagctgataataatatgattaatggtacaaaattattaaatgttgctaaaatgacaagaggtagaagagatggtattttaaaagctgaaaaaactagaaatgttgttaaaattggttcaatgcatttaaaaggtgtttggataccatttgagagagctttaataatggctcaaagagaaggtataagtgatcaattatatcctttatttgttaaagatattcaaaaaattattcaacaaggtgtaccaactgttaaaatgggtcaatttgctctaaattccaataccatcaaataaatcaaataataatgaaattaataatgaagtacctgattcacctaatgagaatcaaatgataatgaatcaaatgataatgataatgagaatgaaatgataatgaatcaaatgataataacactcattataattatcaaaatgataaaaaaacatcaaatgatccgtcacattctcaatctgaatctgaatctcaatcacaatcacaaccccaatcacaaacacaacctcagtctcaacctcagtcgcaggtatcacagcaattaccacctctacctccacaacaacaaaatcttagagacgattactattatacttattaatagattaattatgtaaattatttaaactttatactatatacactatgtattgaactattttaaatttgaaattaaatccttaatagtgttatcaggtttactttcactattagtatttttattattttcaatttctttagtttcactattattaacactctttaaatttttcaattgataaatcaggtggagcattataatcccatttaacttcttcaacataactttcatacattttagcataaatattactttcacttgaccaagatttatttagaaacttttactaaaattggatatttatctaaaagttcttgaatcatcattttcggtctaataaataaataatttgctaaaattactgataattttaattgtgtattatcatcaattgattcattagataattccttcttggaacaaatacttataatagttttcaaataacttgtatatgttatatcaataccattaacttctttaatgtaattaacaaatggtacaattttatgatattgtctctcctttaataaaatatcaataattaattcacatgatctaacaaaagtatcctttttaacattacttaatggtgaaatatttgcaataaaatattcactaaggttgaatttagaatcattattttttaatccatctaagatatctttttcaatatatgtgaattttttcatatttgggaataaattgaaaattttatcgtattcttgaaattgaaatcctggtctaaaagcaatatcattttttgtaaaccttttttggaaaacgtcattaattttattatattcctttaattcatccactggtttttttctaatttctaacaattcaaataattcatcacttttagatttagtacatttggaaatattataagtaacttcatccattatttctttacgtttccatttacttgattgtaataacatatttaataaatcaaatgtatccttatctaaaacttttgaagctgcaataaatttttcaattttatagatggcaagagattttaatgaacatccagttattctttgtaaaaataatgatgatggaattgctaaatgtgatgaatatgctgcaatcatttcaattgtataatttgctaaaaatacaggtaattcaatcctttgctttaaaataagataatttataattgataaaccttcagcaattctaaattctctacacattaaattaactaatctatgataacttccatatgataatttaagttctttctttttaagtaaaagtttaatttcatcaaatgttttaatccttgtacaatcactgtcaaaaactgttgcattgaaatccattttttctaataattcctttttgaaaaaatgttttgcatccattggtaatgtgtaatataatgtataaattaatttatttgtaattggaactttattcattgcctaattttttagtaaattttcttatatctcctaaactttctttacaatttttgaaaatagttacagattcaattgatgttaacaaaatattactatcattgattaaatgtggttctttcttaagaattgatgtaattattttagtatgattttttttaacttgaaatttgtaaaattcatatttaatctcaggtattgattggtatttatcgtaaattttacatacaatattattcacttcagtttcccttctcatatatgaatatcttgtatattccttcataaagtttaaaatatccttttcatctttctcagttaatttttcaatatctaaattcattaatttgtcattaattttaggtaatgtacgtcgaactggattattttcgattttatcgaaaattgggaaaaattcagtacctttagggaatgattcttgttctgatatccatttatgtaaattttcttttatcattatctgtgcattaattttccattctgatggtgtaacgtcggtttctgatttatctgatgattcttttggtgtttctgttgaaacttcatttaatgattcagttggagctttatctgatggttcattggttaatactttatctgatgttttacttgatgtttccgcttttgatgtttcctttggtatttccgtaacatcacttaatgattcagttggaattttgctgaaaacaccagttggaagtttacttaatacttcacttgaagctttgcttggttcatttattattggttctgtagaagctttatcttaatggttcagcagatacttcacttaatgattcagtaggaattttactgaacttttcagttaatacttcacttgagacttttccatcgattagatttatcagtatcattgcctatattatcttttgttactctcggtattttgcacttttacctaatacttttgactctgtatagaacctacggaatgtgaatgtagtgtctactacttcaaacgcattgttatagtataactcctatatacaagattctgctaagaaaatgacccctaaacttgaaatagagagatgtaaaaaaattatctctggaacatgtgtcacaatttttggtctgggctcatcttttttcttaattatagacaggacagacatattttcttgaaagaaaagtatggacgaaccactgattagagaagcatcagcatgctggttcatggtatacagcaaataaaaagttacttaatgaaagaattgataaatatatgagtgatttctatgatgaaagtattgatcatattcaaagaatttgataattcaaagaatgatataattaatgaagatggtagttataaaggtgcaagagttgcaagttggaccacatgcgggacatgaatattgtggctcaatacttggacaagcatataagtcattagatactagtaatattaaaagaagttttcattttagggccatcacattatgtttattataagggatttgtattaactagtgattgtgattattatgaaactccgattggtaatataccaattgatgttgatggtattcaaggaagttgacagactttggataagaaagtgtttcaagaggaatgaaattagaagttgatgaaaaggaacattgttttgaaatgcatttaccatttatttataagaaatttggtagtaatgttaaacttataccaattatgattagtagtagttcagaggaatttgatgataagatagctaattatttaaaaccatatttccaagataagagtaactgcatttattgttagtactgatttttgtcattgggggtcaagattttcatatgaagtttatacccccacgggagatttaaatgatattgtgaatattaagaagaatcaaagaattggtagaaattcaattacccatctataagagtattgaaagtttagataaagcagctattaaatcgataatgactggatcatatagatcatttaaagattatatttattgtacggagaatacaatatgtggggctaaaccattgggtatactaatgttattaatgcaagaatctatcaatggggataatgataaaactaagtcattacatacactaagattcaatggatatgcacagagttctaaggttattgaagcagatgacagtagtgtcagctatgcaagtgcatatgggatagtttgagagagtatgagaagggttattacgtttaagtttgtattttattatttcattttattttatttaacagggcaattggaaatataccagttattattaagtattattaactgtatctttgggggtaaatttactttgctaggttagtcttgcaaatgtctgtagataaagtggaacgtattgatgattggattgtagatgtagtaaatggtatggaaatgttggatattgaagaaattgatcagattaattataaattacagaacatttccttaaatagtaataataatgtagatcaattgaattcatcctcctatgacagcaataatgaaaaggagaatgatatagtagagtatattagtaaaggtttgaacattaatatcaataatagtaataataaactaattactgaggagttattaagtgatattgtagagaatgatgatatagaaagaaaagacttcagtgcatataatatagcaactggtgataatattcttgaagatattgataaagaaattaatgacaatgctgacgatgttactgctaaatattatgatacaataccagattatggtaaagtagaatattgggatttacaatgccatgatttaatcattgataaaagattagaaccacaaaatttccatcatcatgattttaaaccaagttattttaaaaataatagtaaagatttcagctttcatattaacttaggatgtccaaatagttcaagtgatgatgatttgaaagatcatggtataattagaaatgatgatattaaagaaaatgcattacaatatagattcagtaggataaggaaagatggtagcaaaacaatggaatgtatttgtagaatgtgttcctcaaagagatggatacccatcaatctatttaaggaagcatctggcaattgcacatggaattgtttccattgaaaatgttggaaatatagcattaccatatccatcagctctttatcggcaaagtcctggtagattaaaatgttactattgtaaatgtccaaaatgctttaaactggatacgattgggattaatgagtggagttaaaaacattagtgagaccataaggatagaagagaagaagttcgataacagagagattattggaatatacagtaactactaccaacacttcatgacgtgttccttgaagtaatgattgaactgtatgtaatgaacgtgtgtaatgtattaatgtatgaacttctaaatattacttttcatggggaaaattctatttgtgcccagtaattatagtttgatctcccagtagaatttttttggcgatgacaattcgtgtttttttcatgacactgtgttgttaaggtttaatggtatactattggttgatttactcagatcacagcaaggatctgttcatatgaccaactgccaaatgactgatgagaaacactctatccagattttacttcaatattacatttcaacgtcaacttcaattgcagatgttgaaaaatatttccctatagttaaaatattcatccaacatggtcaactcaatatattgacatatttacaaatattacttaaatcattaccatctttctttaaaccccttgatatagttaaacttatagaagaagttttagacttacaaaataatgaaattgctcaaactacagatgaaattattgatcttcaatccttgttagatgtaaaggatggtaatatacctcaaattcttcaaatattatatttcagttaagtgatgaacaacaatcgaaattattctataaatcaaatgattccttaaatgaatattcttataagtataatttagatttgactgataatatgactgcagctgaattatttcaaatcttcatgaaaagtgggattttccgaattactgatgaattttcaagttatggaataaccaatactttaataccgttaattaaaggttctagatttgctagtttggaattacttgattggattgatgggttttattctccattgagtaaagtatgtgattatttacaaaacaattatgctttaattcaacttcaaaatgttatgtcaattgaagaaataattgaaatgattgctttaagtataaaagatgatgaatctgcaaattatatctgtaatcaaatactactaccgtacttatgttatcatgcaatggactcatgggtttgctttaatggttggatggttgaatttggggaaaaaatgttctgttgaaacaaacactgataaaattatcaacaattatggtataatactctctattttaagacaagataatttcctaagagaaatgaataagttatcatcagatattattgactcttttgtctctaacattgtgtctataatttatacattgtcgaggacaaatttacaaatattcatttatgctaaagaaattttgatcctacttaaaacattgaaccttaaagaagataaatctacaggtgtaattgatctacaaaatgttcaaatcatttgctacaagacaagttattgatgctttaattgaaattattaatgttggagaaatattgtattctaatgaacttactatcatagacattatagctttagaaaatgcatctgaatcagtacaaactgaacaggttactaaatatatcaacaatgaaattacatggcgatagttagttccaaaaaatggaagcttttacttagctcaatatactctactttaagaagtctcgtgttttcaataaaattggtgatgataaattaagtgaagttatcctagagaagttattgaatctaaaacaatatgattttattttgacggtatttccgtaatgagtttaactttttatctgaggaaagatttgatgaaataatagaaagctattgcttggtcattgtatatgaatgcaactaactgtgatccaaatattggatctttgaaaaattgtttgaaatgttcagaattattaccacatgactcaaaacaatacaaacatctgaattcgttaattgaggctaattcaaaaataatggattggaagttttatttcaaagcaggccatccggttacaccaaaggatattatagaatgtgatgatccatttactataataagacgtattcttgaacttaatgaaaaggcatatacttatacaggtgatttatactatttgctagtgctattgataaatgggttatcaaatgataaaattgatgatttatttgaagaaaataaagataaatcttgtgatgataaatcaaatttattggctattaaattaaagttaattttattagagttttcagttgttcatgattataatttctcttttaatttgtcaaaggatttgattaacaatgccatccaaaataaaaacaaggttgatggattgtatgacttggttagtgaaaattggttcacattttttcaactaactaagaatgaatatcctgaagtaatgattgaatcaaatctagaacttttaagtgatattttacttattactccaactgaattcaataatagtgttcttgaacattggcaaatgcttaactccgaaaaggaaactatgcaacaacatacagctacaaagcatgttgaaacttcaaagcacagtaatgtagcttcttctttaggagatgttcaagctcgtctacaacgttcaataaaatcatctgctgatgaattaattaatgcaaatggtgctgatattggtaagaatatcataggatggatagttggagcaaattaaataaatttctataaatcatttctttacctctattctatacgttcataaataatctatatctcttgaattaattctaatttaatatactacaatgatgtttcggttttattcatttattctcaaataacttttgaaatgatgtcgaatcatcatcagatcccatcatatcagcagataaatcaaactgagcagattctaccttcttagtaactgtctcttgtggtggctcattttctttatctgattgactattatgtttcctggtttgacttaacagttccattatatccattccaccagagttttgctttttggctttttgaggttttcgaaatctttcaaatctctcaggagttgcagtatgttcgtgaatatctcttatttgtgttggaacatcagaattatatgattttctattttcattaccataattattgattgatgtctcagcatttttcaaatttttatagaattcaataacttttggattagttgtaattttctttggatcaaaattcaaaacttgtaaacctcttctatgttcagctcttgataatgcaacataagcttgaccattctcaaaaattttcctcaaatcaacacaagcatatttcagtgtttgaccttgagatttgtgaattgataatgcccatgctaacattaatggaatttgcgatcttttcacaataacatgttgatgttcatcttcaactgagaattcttcttcttcaacagcaactgttcttgttgcaccatttgacagtctaaaacatactaatggtaacaaaactttccgatctccgttctccctcaatgctcgcagaagttgttcctttgattcaattgatttaagaactgcatcttttgaacttccaaaccgaatttcttcatctacttcatctttgtcttttctcatactccaacaaacttgtatctgagtcatttattgcttcaatactatcaggttcattttttatcgaatctttcaacaatgcttttgattctgccaaaaagtcaaaaattgtatcctctaagtccacggttggtgttactaatctattaaaaattgatgagtctgtatcaagtctcttttttatatcactatcaattgattgaacagtttcataagttgttttatccagaaatccaacaacatttcccaatgaaccattaactaaagttgaatcaatatttttaatcatcatgacttgggcacctatcttcaaggtaattgatttaggagctaaaaatgactctaaaatcttttgaccttgtggtgtatctgctaatttacctgtatctgtagctgtgaatgtaataccatcaccctctaatttagagatcatctggtgatttgatctatcaacctctactctagttggaaacaattttgtgggtataagtcctcctagtgaggataatggtctttccaatgctttgaatttttttacagttgatggtgatactttcccatctctaacctcttgaagcatctgtaagaactgtttatcaccttgttgtctgaaaactttttgtaataaaacctgagttttaatatgatttttccaaaactcactttcaaaagcaaatttcattctacctgttttagaaactggtggtaattgataaaaatctccacataaaataacttgaacaccaccaaatggttttttattctcacgtactatttgagaaataacgttcaagtttgtctaactagttcaccatcaatcattgaaacttcatcaataattaaaactcttaaatctttccaaagttctttttttgttactaatctctttatcttagctgctatattgaccggagtaccaactcctaaaccaattcccgcaaaggaattaatggtcatacctccaatattataagctgctaaacctgtagaagcggtaacaccaactgttccctctggatgtttatctctcaattttttaatcaattctcttaatagtaaagatttacctgtaccagcagaaccagtataaaaaatgttttcacccatttctgcaagttgtatgacaatttcttgttctttacttaaagtgattgctttaacgtgcttctctgagtcttcgggtttaggagtgggtgaagctcgatcgggtacttgagttgccatatgcaatgttccatattgtcttctttgttccgttattactggtttcctctgtttcaatggagatgattgcgtgttattcaaaggttctgcattttcagattcaacgggtacttctggataatttgtgataattggagatgatgatacagcgtttgtatttgggatatctattactttggatataacaggagatgatgagaataagtaatcaagttctcttttggtaggtctgacatttacaggtgatttgaaaccattcgaatcttgttcggtaattttggcagcagatgcaattgataaaactttagctgcaggaactggttcagtaacactagatgcttgcgtatgagcaaaatattgtgacttttcctgcaggtattggttcatttaaatcttcgttggtatctagaatatttgttagttgttcaaagacatgtttcttatctgtatgatgctcacttagttcatttaataaagattttagtttcattgatacttcattatatgagtaagattttagatcattttcaaggaaatttaaaaggtgaaacttttttctctaattttggttttttacgagagggagtaataacagtctctgtagttgagctatcagtgaatgaatcaaaatcagtgtcataatttaataccgttatttgggcctttggaacggaatccaaatttgagtctgtcatctgactgaaaatacttttcgggtaaactttaaaacttttattgaataactgaatatataatcttgatgttttgagcatattaaattaattaggtattcaataggtagtaatttatcctattaaatcagcttatcagtggctaaaagacacaaactatgtatttctttcaaactgaaaccttatataactggaaataattcttgacttttagaagttttaaattagtttttgtgtttgtattaactgatatatacaaatacttcttaatgtgatgtataataatgtgatagatcgttactttacacctttaataactctttattgttagtgtttttaaagcaaaaaaaatatagattttaatgtaatgtgcacactgtgtgtagatttggcgtctgttttcatgtttttaagttgtaaagtcgcgtcgtgagggatcttgggatcttaaaagttacaataagtatatggaggatggttttcttctaccagtatattaaccatttacaattatactaaatactcaatagaagagctcaaacacaatgttttaatttggaaatatcatcaaaccaattgcaataaccattctagaatactaacatgcacagtaagaggatcataattaatgctataaaaactttacgtaatataaaccaaagagagtgcgcttaggaaaaaaaactgaaaaggcaaataatacctaatttacacatcaaattcttttattatgtagtctttttaagatacacttactcttctgatattttcttttaactaaacccatttttcatcaagaatataactattgaatacctttcaatatgttaattaaattgagtgactcttttgatccagaaagtgttccgattgtaagtattctcatctcaattatatgcagatttttttccagttggcttgaaaaacctagatcaagtatactaactatcattatactcttactttaattatagtctcctgatgttgaaagggaaatgaacattttggcttcatgttcaattactgatttagtgaaaaatttgaaaactaaatatccgaaaaaatgggatggatctcatcctgatttgaaacattatgttcctttattaaatagaattgataaaatttttgaaactcatattaaaaaatataaacttgatgaagaatttattttaccaattgatgttccacaagaggaaactgatattattatcacatgtcttaattattcaaatcaacttttagaatatagtacaagtagagaaatttataattcaaatggtcatgtagcagatttaatgttttctaattcattagatatcaaaattgcatcaattaagttaatctgctgtttgtctgaaaaatttgcggctcactatccaactaaattttctctttcaaaaaaacataaagatactttgattacttttatcaaattattccctcttcaattggttgaaacctctcaaggtccaactcctattgaaattaaaacttataatcaatcattatcttcaagaaataactcaacattaactgaaaccactgattcttcttcattgaaaaaacataaacatagtaaatctaaacattccaacaaagacgtcactcatattagtttatacgattgtatgagacctgattttaatgttccgtcaaattggaaacaattgagttatgactactacaaaacaggaactactatttcatctcgtgctagctccgctagcaagaaagattccactaaagataattcaggtgaaggtttacgttcatttaaactaagtactgaagctttgaaaaaactgtcaattcaacaaatttttgataaagctgcagatttgattcctaaggaaaaatggtcagaatttgttttacatgtctatattgcaatcgcatatagtgggaaatcattcgaatgtttagctttgagaggcaaattggttactttcaaatgttatgcaattgcagctgcatctacgaattcagcttatagtgcatttgttggtttagtttttgatgatgaaccttatttattaacatatatgtctgatttaattaaccctgataatcatgttccaagagaaccttgtattgctacattgcgtgcatttgtaagtatttcaactagaagaaatggtgcgtcagatttaatgaggactttaggtggtcatgttagtcatggtcttcttttccatattttaaaaaatattttaaaacaggctaaagatcttaaatttaataatgatcaaacttatatgaactatttctacaatttgttggcaaatctaattgaaaatagatctttagcaactcatttaagaacggcaggtttaatgaaaattttccttgatttcttagtcttaagaaatgattatagaatgactcgttcgggtcctttacatttaattgaaatgtttattgagaaatcagccgaagcatttgatgattttgttgcatttgatggttttaatatcatcatttctctccttgattttgaagttcaatttgctattgataaacctgattttgaaggaggtgccccagattcattaagaaagaaccatttaattacagcaagacaagttaaattattgactttccttctcaaattagttatatcattgattacaacatatcctggtgacagaatgagaaatttatatgattctccaatgctgaaaagtttaattaaaattatggatcatccaagattatttggtaatgaattacttatggattgtgttagaattataagtacaatcattaatagtgaaccaactgcatattcaattttaaatgaagcgggtattatcagtgctttccttgaaaaatttgaaaaattcttacttccagatactgatttattattagaattacctgatgttgttaatgcaattgctttgaataatgatggtttagcaaaaattaaagaatataaaattattcaaaaaatgttcaagattttcaaaaatgaagaaatttgtaagcagttggttattattgaaaatgttattaatttcggtaatgccgttgatgagctttctagacatcatcctgagttgaaggctactattgatgaagaagtattaaacttaattaatactataccagatagtgttacatttgatgcagttgatttttacaaatctaaaaatggatccctgtatcacggacaagatgagaaaaatattcacacagaaaaggattccaaacctttagaaagatgggaaagttcaaaagatgcaagtatagttcaatgtactttaatattccttgcttcaatgtttgaaaattcaaaagattggaagagacttcatgctcatattgatatggataaattattcaagtttgttactttgaaaaatgcgccttttgattattcactgtcaaaaacaattattcatttcagaaatattataaaatggattgatcaagctacaatgtcatactgtcttccagtattgttttgcaagattagtgatgtattaatggaactaaatgattttatcatgtttccagcagatgatgtatcatatttcaatcaatttgaagattctttggaaccttctgaaaaagctcgtcaaacaatttcaaacttaggtattgctaactcacttttgtttgttttatcagatttttactccaagttacataaatatcaagcaaataagattatggatatcgcacgtgtatttggtgatgaagaaggtttgattttagttgaacgtctctgtagattctatagaagacttgctatagaagaagtgttacttcatgtcaatactccaaaagatgttgcaagaaatgcatttacattagttcaatcaatctctgtcaaacaaagagaaattggagaaccttcgaagaatgatggtgattggaatggtaatagtgcaaaattcaagaacatttccattttgtattttaatttttcaagaacaaaattctggttaagaaacgtctttgacagtttctgtggtataaattatgctaaaaggcttactaaagaagtcaatcgtggtacattcacaaagcttgctgttggtgttattatcaagtatacagatacgatgctttcattcttggaatctcctaaaacagataatattcaaataaagcttggatttttggttttgtttgttaaatcaactttatctgaatcaattcactactaatggaaatcaatcagctgttaatcctgttttcagtatttctgtacttcaaaataaacacttcccaaaactcaaagatatcactgttgaaatgttcaaattattaagttcttttgatgaaaaaactattgcactatatgccgataaagaatatatttcaattgatgttgaaagtttggttttagctgtctctgaccaattactcaatatctatgctgatttgggctctgttaatattttaggatcaattccaagtgcaacaaaattgtacggttaccttggtaattctgctcgtgagtatgcatcagaagttttattatccattcaagttcaagctgcaatttctaactttgttttactccaagaattgttttctgaaaatggtttgaatgctctcaagaatttcccatctaaaatccctgaaggtttaattgaagctgttattttgattagtaagactgcgttcacaaattttaaaactcatagaatgaagtttaagggtagattatatccaatatcacctgaaacaacaagtccatcagattatgacatcaaattcttatgtgacgccggtttggcaaatgatgaagccattaaagctcttgaactgtttggtgaatctacagaagtttggttaaatgaggatatttcaatactaaactctcattttgatgcatttgatttatctggtcttgaaggcaagaaatatacgcctcaatctcttccatcaattcatcttgattattctccaaaatatgatattgatactgtggatgatttgtcatttatgatcagcactgaagagcctaattatatcttacattggatcaccattgctcaattatatcctgaatcatctgaaaactattgcatcattaatcttgtcggtctttgaaaagccattctctgaatgtatggaagatgttttaaaccctattattgctatcatcaaagaaatggattttgaaactgatgatgagaaacaaagtcaaaaactttcagcaacattaacattagttgcattcattttgaacaaactgaaactttccaaatattttacaattattgatgattttactaaatttattgcatctaagttacaaaagaaaaacataaataaagtttggtttccgagttgcttaatgttatttactaaaatattttctgaaacaaaagtgccatttgcacctaaagctccagttgtatcacatgaaaccagattcactagctacttgttaactccacctgatattcaagatgttgatcaaaagattgaaagtaagttactggatttactgctagatattgaagacataaaatctgaagaattgttacttgaaatcactaaccttttgatactattatgtaagtctgatgagactattatgcttctttcgcaatcaaaggtaattcgctctttgataatttacattagaagtaataaatgttctgctcaagtccaaccacaagtcattaatatcataagaagatcagtggaatcaagttatatcttaagggaatatttcagcaaagaaattgatcaattactaaataagaaatctgttctcgttagaggcaaaggtaaagatttgaaacaatttttagaagacaatttagcgttagttcatcgtaatgcggaaatatttacggaggtaattagtgaaaaatgttatgttaaagaagttaataagcataataaatcaccattgttatctggattaactgatgaagaaataaaacttttagaacgtcatggtattgatatagataataaggcttcaaatgatacgaaaaatgaaaaaaccgctgatatcatgaattttcttctttcagaattaatgaacgttagtagaaaggatatgatggatattttatgtgtgaaggaaaaagaatctgaaaaagatttgaaggattcaaagaaagagttaggtacagttgaaacaatgaaacaaaacaacagaagtttttcttatgctatatttttacttcaagttatttctgaactacttttctcatacacttcatgtaaaactgaatttttgacattctctaagaaatcaaagaatcctgtggagaaaagaccacgattctactgctttgaatatgttaattcataaatttattactatcaatacattagagaaagttgacaaaaatatatctgatattcatgagcttttcactgcattgggtactgtttgtatattaggtctaatcacatcaactcctgctattggctttgacttcaacgatccaaaatcatcagataacgatataaactttgctagaaaattcaccattgatattttaatcaaaactattaacgaaattcaaaactcaaataaaaactcagtaattaaatatagtagagttgttgatataattaatcttgtttcaaaactatgtggagataagatgggtaataacgttgttgttaacattgatttagaattgactgctcatgatcaatatcgttttaccaaagagttactcaacaagaaatttggttgtattgctactaatataatggctagattggatatgaattttccttatactgagcaagtttcagaaagtattttaaaattattgggctgtttaggtgacacgaaggtaaaataccaagaaactttcaaagaagaggagcaacaaacaactggtgttgatgaagaagcatatgaaaatgtagacgttgatgaagaaggatgaaaaagataaggaagatgcaccagatattttacgtaactcaacattaggtatgtatgatatggatgatgttgaggatgaagatgatgattatgacgatgattttgatgaagaattttagttgatgatggaattgagattattttatctgataacgaaggaaatggttctgatgttgaaatcattgacgaattgaacgatgatggtgatggtgatgttgatattgatattgacagtgatgaagatagtaacgaagatggcgaagacgatgatgatatgatggatagtgatgaagacagtgacgaagatgagcaggatgaagatgatgctgatgatgagggatacgggcatagaatgagaggtaatcaaatcgattttgtatatgaatctgatgaagattcagatgatgatatgattgatgcccatgaaattgaggattatgtttctaatgctgaagcagactttgattctggtgatgaaatttcagatgagggacaatatatgttaggtgatacctctgcctctgatgaagaagatgaaagtgatgttgatgaaaatgttattgaattagatatcaactcattagacgaagatgatgataattcaggtagtgatagtgatgactctgcaattcttgaagaatggttgaatgaacttggtgatgaagacgagaatgatgaagcttcaaatactgaaagaagacgtcttcaaagaagtggtgagttagcaatgaatgatgctatttttgatggaccaagaattcaacacattcctgcaagactgttattttcaaatagggagagtgctattcctttaccagctgaatctactaatgatgatgctagacgtacttttatgcaactaactcaaactattatgaatggtagaaatgaatcaaacacttccaatctgttagatttgagaagagttcttgaaccattattctcaaataagagttccaagtcaactgttattgaaataaaatcaacattacaaagatggcaagaagtttctagtatatatagtggcgaaaatttgacatatcgtgctattcctcaaatcattaacttaacttatgataagagtgctgttattgccgaagagaataaacgtatcaaagaagaaaatgatagaaaacgtaaagaaaaacaagaagaagagttaagaaagaagaagaagtggaaagaagaacaacttgaattagaaagacaaagagaggctgagcaagaagaaagaaatagcaatgctgctaatagtgaacctgttgaacctatctatgttgatatcgggggtgagagtgttgacattagtggtaccgggatagatcccgaattcttgttagcattacctgatgatatgagacaggaagtttatgaacaacatcttgcacaaagtagaatcgagagaggtggaagagatgccttgggattcatcagaaacttagctatgggtaacaacggatttaatatcaacttcattggatccaatgatgatgatgaggaggaggatatgaacaatgaaaattcacgtagattacgtcgtattaattttgggggtgatgatgatgctgccactaatcacgatgaaggtgatgatgatgaggacgatgatgatgatgatgatgacgacgatgatgacgaggatgacgatgatggcatggatgatgatggtgatgatgatgatggtggtgacagtgatggtagtgaatttatattcaatggagtttataatgcatttggaatcaatgttgcgggtgatcatggctctgttagtatgcacagatcaaacaatcctttggttatctcaagtcaggctaattctaaaacaaagaaaacttccaggatatactttagtgcaatgattgataaaccaggtattgcagctttagccaaattgttatttgtacctcaaatctattacaaaagagttctgttttttaagagcattgaatttttgtgtttgagtaagcattctagatctgatttgattgcatttattctttatattttacaagaaggtattaaagatcaagcatcaatcaaagcagtatacgaacaaatctgtctcaaggctaataaggaaactaatgaaaatactgaaactgaaactattaatgaaaatcataatgaaaaatcaaataacactattaattctacgcttccaaccaattgtactattatttcattggctactcaatgtattgatgctattcaatatttacttgaaaatgaaaataatatgagattccattttttgactgaacaagaaggtttatcatttttgaagaagttcattaataaaaggagtaaattaaaggataaggagaatagtttcaaattcccaattaatgttttattgaacttgctagacaataaagttatcaaggatgatactaacttgatggatattttatccagatcaattcaaattgcaacaagaccactaccaacaatgaaagaaaagttaaaagaaatttcctagtaatgaagctactaaaaagtctcctcaattacctaatattcctgataagagcttgaagcatataatcaatacattggttgcagatgaatgtgctaacaaggtttttcaacaaactattgtatctattcaaaacttatctgtcttagagaatgctaaaattgtatttcctaaggagttgtctaaaagagcaactgttttaagtagtaagcttgtcaaagaactaagagaacttatcaaagaattacaaaacagtaataaagatattgaagatttgaattcgttggggcaattttcatcaagtgcatctgaccaagcaaaattattaagagttttaacagcattagattacttgtatcaatctaaggataataattatggagatgacattgaggaattaaaatcactttataagaactcttcattgggacaattatggggtgcattaagtgactgtttaagaaacttaagagaagatgaaaacaaaaattcaattgcatttatattatcgccattgattgaagctttgatggttgtttgtaaacatagtaaggttcaaagaatgaatttgctggatgttcttaaatatgaagaagataaaggacgtgattttagtaaggagccaattgaaagtttatttttcacatttactgaagaacataaaaagattttgaatcatatgattagaagtaatcctaaattaatgagtggaccattctcagttttgattagaaatagtaaagttttagagtttgataataagagagcttattttgatcaaaagttacatgaagaagatgataataatcattccaatgaaaatggtgagaataataatagaaatgaaggtagagaaaaattaactattaatattagaagagatcaagttttccttgattcatatagaaacattttctttaaacctgttgataaaattagaaaaagtatttttgatattcatttcaatggtgaagaaggtgttgatgcaggtggtgttactagagaatggtatcaagttttatcaagacaaatatttgatccaaattatgcgttattttcatcagtttcatcagataagagtacattccatcctaatagaacctcttgggttaatcctgaacatttaacatttttcaaatttattggtatgattattggtaaggcaatttatgatgggtttgttattgattgccattttagtagagttgtctttaaaatgattttaggtaaatctgttaatttaaaagatatggaatcactagatttagaatattataaatctttagtttggatgttagagaatgatattactgatattattgttgaaaccttttcagttgagagtgaagattatggtgaacataagattattgatttaattgagaatggacgtaatatcaatgtcactgaagagaataaggaagaatatgttaagttaattgttgaatatagattatttacctcaattaaggatcaaatgaataatttccttgaaggattttactcaattattaataaagaattaatttcaatttttgatgaacaagaactagaattattggtttcaggattaccagatattgatgttgatgattggaaaaataataccaaatatgagaattattcaccatcatcaccacaagttgaatggttttggagaagtgttaaatcatttgatagtgaagagagggcaaaattattacaatttgttacaggtacatctaaggttccattaaatggattcaaggaacttaatggtatgaatggtgtatcaaaattcagtattcatagagtttataagtcgactgatagattacctactgctcatacatgttttaatcaattagatttaccagaatatgaaagttactactaaattaagaaatgcattattattagctattagagaaggtcatgaaggttttggatttgcttagttgttttttgtttgttgtttttactgttattatttttgtttttatttttatattgttaaatatagtattaaagataagttattattatactgaagattgtaagtaaatgaatattttattatgtaataaaaattttacatgaattaaatttcttttaaagatcgatatcaactctatttcttttcatcaatgaaagtaagagttagattaggtaagaacgttggaggtagtggatatggagttcaaaaaaggtatggggatgcatttaggaaagaatttcaagagaaaaggttagaaaaggagaaaaaggaacgtattaaagaattaggacttgaagaggacataagtataggagaggatttatggaggattaatattgaaagtaaagtaccatataaagaatggtgggattccgagattgatgaagatagtataacatcatatattttacatcctgttacctaattggaaagaagataaagaaattgccaaagttatgttaacgaaggaggagagacgtaaattaagaaggggtagaagacgtgaaaaggctgaaaggatacgtgatttagagaaattaggtataattaaaaatgagataccatgatgttgatttaaaatttggaggtacaggattagagatggcaattgaagaagagaggagaattaaacgagctaaacatgatgaaatgaatttacaaaggaaagaggaagcaaggggtaggaaagaagagaaacgagaggagaaattggatagggatatggagaaaggtatttatagatgtgttgttagtgttggtaaggggaagttaaatgatggtaagaataggtataaatgttaatgttaatggtagagagatggggattaaaggagtttgtgtatcaattagggaaagtgaaggtggggatggatcaggagttgttatttttgaaggtggtagagtaagtgttgataaatataagaaattacttgttgaaagaagtgaaattggtgaagttatttggatgggtgaagttggtaaatgtgtatttaataaatggagttattatgaatttaatgaaatggttgaattaattgaatttttgaatagtaaaggtggtaaagtttggatttatcaaactaattttaacaataaaataaataaataaataaataaataaataaataaataaataaataaataaataaataaatgtattatattatattatattatatacaggtatactactactatagaaattaactataattattcaattttagcaagaatttcagaatctctgaaaaggatgaaatcatcctttgaatcttcgacattaacattaagaccaccgtgttgaggaattaaaacagtatcaccaggagcaacttgaggagcaattaattcaccttgagaacggaaacctggaccaacagcaataacagttgcaagatttggctttggagcatttttatcagggatataaatacctgaagcagtttgttgaggaactgcagctctttgaacaagaactctatctaaagttggacgaataagtttagcggaacgaattaaggaagcggacatttgttagttgttaaatgaaggattgttaaagatataaagagattgtgatggtattagagatggattggcgatatttaaataagagagagtgaaatttgaaaagagagtaattggaatattcgagaaattttagcttgattaagtgtttattgttggttattggatggtatgtgtgtgtggtgtgtagtggatatgggatatatgaagtgtagatgtaaatgtatatgtagagtgtagtgtataatagggtatactatttaatgtaatttatttagtaaatcaagtaaaagttatatcctagatgaacaaatatgtgattaacgtaataatttgattagataacagatactaagttctttctccaaatatcatataccaccataccaccaaacaatgcttatagttgtactatccgatttaagaataccaacatctacagcatcattaccaccacaagtttgctgcattacttaaacaaaaatcacgtattgataaagtattacttctcggagattcaattacagaattaaacaataaatcgaaattaattttaaaacttgaattaggattagttaatgaagataaagatgaggatggtgatgaggaatgatgaaggaaggatggaacttctgatgaattacttagatataataagtccaatacctaatagtgtaattaaaattgatggattatcaattggatgttgtagttcattacatgtaccaaggggtgatccattaacattattatcaatttctagacaattaaatgttgatatattacttgtaccaccatctggaccaattggtaaatctgcaatgggtggtacaattggaggtagttaatggaggatctgaggcttatacattagatgatacattatttgtatgtccaggatctgcaactggtgcatttataccaggtaatgataatgacaatgataataaagaaactcgtcctccatcattttgtctattagagacaataccagagggaccagataatacacaaggcacaatgcacactctacatctacacactagaccctaactactaaccaagtgtccatagataaactatcatacacaaagaagtaagatgaattaaaccctatataaagaaaccctctcttttcaaacagtggaaaaaatttgattttcctctataaaaggtatagtaaattattttatgttttaagtgttttctttcttctctttcttttaacaaggaaatgattatgtacagttgtacactatcatgtcttctctagataatactaatgtgaatttaaatgatgaccagagtgcatttggctcgagatgcgggtgtgacgtcttgtctaatcccaacgcattgatgtggaaaaaaccacgctacctttaaactatttctgaaattatattcacatttatctatctttatctttatctataagtaaactatacttctctatataagatcaattgtaatatcatcattatcttgattaacccttttaacatcctttaattcctttttcatataatatgcatcttcaccatcttgataataacttttttcaacacttaaaacttgaaattttaatgaatcacgatataaatgtaatgcagctctattacttgctctaacatgtaatgaaacatattcacatttatattcttcatataatgaaattaatgataatttcattaattcacctgcaattccatttcgacgcatatttcttctaacacttaatgatgtaacatgtccatgtggtgtcttatcttcatcatcatcatctgccattttacctaaaacatatccaataacttcattcttttcatttaatgcaacaaatgatgctcctggccatgataataaatgatataaataatatttaattgaataattttctggtaaattatgtaaattggcatcttgcattgcttcaacatctttaacttcagcccttctaattgtaatcattatctatatgctaatatctatatctaaatctatatactctcccttgaatataagagaagagaaaacagtaaaagatgcatgcattacattttcaatattagctaagtgaaaaattattatctaatacaaaatcaaaatcaaaatcgaaaattatcgacatttaagtcttagctttatacgggtttctctttataaactctcaatatacatcacataatgccatcaccaacatctaccattgccatcacctggtactttacgtagaaatcaaaatgcaacttctctaatttatgataaaaatatttatagaaataataaaaatgtttcattatcttcattacaattccttatatggaaattgtttcacaatatatgaagaatacaaacaatattttaaaaattgaacgtaaattaaataatttaggttattcaattggattaaaatatcttaatttaatttcaacaaagaataatttctataaataatattacatcaaatggtaaatcaaatacttcacatagaattactaaattaatagattttttacattttatttcaaatgatatttggttatcattatttaataaatcatcaaatggtttagagaaatcatcagataatgaatttcaatttatgataattgataataatccaattataagttcattcctatcaccaactcaagaatataattcattatcaattgaatcatttactgcaggtataattgaaggtattttagatactgcttatttccaatgtgaagtttcagctcatcgcgtaccaattgttaattatccctaataagacaatctatcttattaacttaaagcaataatatagtaaagtaataccaatatcaaatacattatggatttatcaattggttcaaatacattggaggacattaccaggtatgataacacctccattaccaatctatacatcacctataaaattatcaaattcacaaattaattcatcatttacttcaactccaaaaaggggaaatttcaacaggaaaagtaaaagtattttaacattaccaaactatgaaaagaaacaaaggaattgtaaaaaagttacatttaaatttacaaatactaataaatcatcttctaatagatctattgataaactacatctttggttatcttatagattagttaaattatttcatgaaaaatataggactaataaaatcaaattaatgaaacataatataattgttcctttgaaaaataatttaggggatttaatatagtatagtacgtacgtaggtaatagtaggctttgctagaatatataatatgatgaactgggtatataaactatgatgggtaatgatttaaataatttttataattttttgtaattaatagatctttttaaaaattttcttttgtaatttaattattcttataatgaatctttggtatagaatcttcaaatgagtgaaaattgttgatttttatattaaaagtgtgtttctgaacaaagataacaatttgcaattcgaaaatttacattgccctttttaaaaaaaagtaacttgttaaatttttttttcataaatttgtgttttttaagctaaacactgtgttaataataagaatttataagcataatactataaattatattaaaactttataaactttaatgaaaaaccaataaaacaaccctttaagatgcttacgtaattatcaccaccaataacaggtcaaaccaccaatatttaaaaacaacaattggagggatggccgagtggtctaaggcggcagacttaagatctgttgggcgaatgtccgcgcgagttcgaacctcgcttccttcatagcttttttatttcactgattattttttacttacttacagtaacaggaggagagagaaagttaataaggaaaatttaatatagaaaaagtgacttatcacattttcaatattaatggcaattcctgtttcttcttttttatttcttagttcctggtttcttttcttcttcctttacactcatcctcttattaactagaatggctccaataataaacccaatacaaaatgaaaattctttaacacgaaataatataataccaaaacgtatgattaataaaaggaaatttgaaaataataatgaaacatcaaataataatagtagaatgaattttataagtttagaacaaattaagaataaacaaaatagaataattaaaaggaagagaaatataaataatttaataattggacaaaaattaccaattaatagaattattgaaactcttaataaggaaaaattacaattattaattaataaattaattaatgaaaaacctgaaattaactaatttaattttaaatctatcaccagtaattgaaccaaatgatgcattaaatcaacttaatgaaaaattagaaattatcttaaaaaatttaccttataaagttgaaattaattcagattattcatttttaagggttaaatatttcgttaatgatttctttcaatcattatcagaattttcattaaattatttaccaccaatagagaataatttaataatttcaattaatttcttaaagaaatttttaattgaaattttccataaattaccaaattttaatacagttgaatttaaatatttctataatttaacaattgataaatttaatttaattttagaaaattcaattaatcaatttttaactgaaaagaaacaaaatttattacttataattaatgaaaattggttagatgaatttaaattaattaataaattaaataataataattttattaaaattgaaaatttaattgaaaatgaaattaatgattataataattcatcttcaattatacttaatgataatcaaccagttaatttagttcaaaaggagaataaattacaaggtttagatagtttattaaattttgcatatcaaacaaatacagttgataatatatagtattttaattaatgcatactttccagttctcatttccatttcaatcttaactccatttcatttttatataccatctatacttacatagctttaataatatcttttatcacaaataccatatacaacatactgtactttattattattcttattttattgtaatatatatacaagactatacaaatagttttataactaaatagataaacctaattgttctaattcacttattggagctgttttaatatattttctaactaaatttttctttatattcttttgagttgattcatttacattaattttttcaaatattttatttaatttatcattatttgattcatcattaaataatttattaacagtatttgaaagtttaataccaattgctaaatcatttatcttttcacttaattcattaactgatggtgtgaaaacattattttctttagtaatattatatttttctttaatttcattaattctctttaattcatcatcatttaattctttctttaattttaaatcttttatcttatttaaatcattataaaaagattcagttaattcaacatttttattatttaattcttgctttaatttaaataaattaattttatcattttcttcattaataacattaatttttgcctctttttgataagttaaaaattgttgacctttattttttctaatttctgcaactgcaaaaaattttttagaacttaaaggtcttgtttgttcaattctaacaaaatcaccttctttacaaatattaccttcatcatgaactaaaaaatctttcttttgaaggaaatgtttttgaacttttttatcaaattttttttgtaaaactctaactttaatagttttattcattttaccttgtgatataacaaatcctaaaaaatttaatctagccatgattgtatttgatattggttattaggggagtgtattgaaaagaatcaactctctacaattacttatactctaattcgtccataaattcatgttactattgaaattttgaaaaatctgagaaatgtctgaaaaatatcagaaaacaagcgacgcatcgacgcagagcaattgaatacaattaatataggatagcaaagcattgagatgatggttgttatatagataataagatatacagtagttaaatagtagaattacgatccataggtatgtagaatgcattttcattaggaggattaggattaggattattattatttttaagtaataaatttcttttatgaatttttaaatgtctattcatatttgatctaacagagaattgtctaccacaatttggccaagtacaaataaaaggtttttcacctgtatgaatattcatatgaattttcaatcctgatggtctattaaaaattttaccacaaattgaacaaattctattattaattgtagttcctttaggaattttctttgtaggatttataattaaatttgaattggaaattgttggactttgaatattgattgaattttcatttgaattgttttgtgcatatattggtagatcaattgatattgatgatagtttattattattactattgttgtctagaggtattggtaaattagatgtgaaattatcattagtattattattattattattattgttaatatagctataattatttcgagtagtagtgatattatagctatgattaataatattattattatgaggtattatagatgagttattagtataaggatattgaagtatattatatgagggtattgaattattattttgattggaataaaaaccattattattattattattattattatcaggtatcgatttataataaccataaccatatctttgaccagcagaatgatataattgattagagttattattatatgatgtattattgtatactatgttattgttattattattattattattattattattattattgtaatccatataagatgtaggagctgaatgtgaatgttttaatggcattgattctatataatttgtttgataattattgttagagtgtgaaattggttcattatggtaatttatattattattactattaacattaatactattaatattattattactatcatttgataattgagttgttgatacaaatgtgggagaatttacatattgattagaaaaagttgatgaagggttagataaattatttgatgtgtttgatggattatttgatagtattaaatttgtattaagatcgtgagaccatgattgcatttgataaaagttagataaaagtaagatgagataagagaagataataaaaagaaacgacaggaagaaagtgtaaaaataaaaccaggaacgagaagatagtcgataaaggaagtttttctcaatcaatagcagctaattaaagtgcggctgtagaaatagagtttagtaactatattataatctattagtattgtttaattacgtaatggtatcacgtgaccgaatgatatcacgtgagacggtcgatgggtcgggatagttttttaaatttttcaatttataatttcaatttgagaaaataaaaagaaatatcgcttagtatagtaacaagactaagggcatgtaaaaaaatttttttattttatttttttgtgtgaaaaaaaattattttgatcaattttcctaatcttttgatcagaataagtatatactattcataattatcttctccttacacaccaacaatgcaattaacttggaaagatatacctagtgtttcaacttcaaatgatatgttggatatcgtacttaatcgtactcaaagaaaaactccaacagttgttagacaaggtttccaaattcaaagaattagagctttctatatgagaaaagttaaatttactggtgaaggttttatagaaaaatttgatgaaattttatcaaaattcccaaatattaatgatttacatcctttccatagagatttaatggatactttatatgaaaaaaatcattataaagtttcacttgcttcagtttcaaaggctaaaacttttattgaacaaatttcaagagattatattagacttttaaaatttggtcaatctttatttcaatgtaaacaattaaagagagctgctttaggtcgtatggcaactgttgttaaaaaattaaaagatgctttcctttatttagaacaagttagacaacatattggtagattaccttcaattgatccaaatacaagaactttattaatttgtggttatccaaatgtcggtaaatcttcatttttaaaatcaattactaaggcagatgttgatgttcaaccttatgcttttacaactaaatctttatatgttggtcattttgattataaatatttaagatttcaagcaattgatactcctggtattttagatagaccaactgatgaaatgaataatattgaaatgcaatctatttatgcaattgctcatttaagatcttgtgttttatattttatggatttatctgaacaatgtggttttagtattgaaagtcaagttaaattatttaattcaattaaacctttatttgcaaataaatcagttttagtagttattaataaaactgatataattaaaattgaaaatttagatattgaaaaacaaaatttaattaattcaatgaaacaattatcaggtgttgaaattatggaaacttcttgtttaaatgatgataatgttatgaatgttagaaataaagcttgtgaaaaattattaacttcaagaattgaacaaaaattaaaaggttctggtagaattgataatgttcttaataaaattaatgttgctaaaccaattcaaagagataatcttgaaagaaatccttatatacctgatgaagttaaaaatttgaaaaaatatgatccaaatgatccaaatagaagaattttagcaaaagatattgaaattgaaaatggtggtgcaggtgttttcaatattaatttaaaggaaaaatatattttagatgatgaagaatggaaaaatgatataatgccagaaattcttaatggtaaaaatgtttatgatttcttagatcctgaaattgcattaaaattaaaagcattagaagatgaagaagaacaattagagaaagaaggtttctatgattctgatgatgatgaaatgaatgatgataatgatgaaattaatcaaatacgtgaaaaagctcaatggattagagataaacaaaagaaaatgattaatgatgctcgtttaaagaaacatttgaataatcgtgcaattatgccaagatctaaaattactaaaacttttaatgaattggaaaatcatatgtatttagttggtcatgatacaaataaattaaaggataaaagaactaaaagtaaaaaaccttcaaatattaaaggttcagatattttacgtggttcaattaatgatgaaattagagatggtggtattactccattaaatcaatctgatagattaaatgatggtattgatgatggtgctcttagatcaaaggctgaaagaattgttaaaatggaaagaagagaaagaaatagaaatgcaaagaaaggtgaagctgatagagcaattggtaaccaaatgccaaaacatttattttctggtaaaagaggtatgggtaaaactgattatcgttaatcattttttatcattttattacattatctattgtttgttttgctataataatctatttttttttgattgatttcaaaaaagaaaatttcaagttttatattcatattcatatttttttattatctacattttgtatttctgtttattaattttttaaaaaatttctcccatataaaaaaaatgacaatataactatttaaaatacaattttacttatttcatttttataaagtaaccctcccaaattttattattccatgaagaatgcagtttcctcttcaactatacaatattgtcctttattaaaacctgaactatttggattagatccaaatgatgatctactttttcttctaataagttcttgaggtgttaataaatcttgtaatgtacttggtatataatcaatatcttcattatcattaccggcactattattattattatcatcatctgaatcaataattgcattggtattattaacaaacgatgaatattgtggagcttgattcattgaagttggaacagataatgaacttggtgacatcatcattaaatcaattggtgaacattgataagtatttggatattgatttgtatttgaatattgtgaattaatatttggtctataaatttgatttgaattaattattggactggtattagagaaagaaaatgatcttaaaggttgattttgaaataatggtgaagaattcaaattttttgaagaattggagttaataatgaaatcattgttatttagttgattaatgttattattagtactggtattattattattatcagcattccacataaaagtattatttggaacggaattatatgaaattgacgtaagagttgaagataataaaggaatttgatttgaagaagaagatgaagagtttggtaaagttgtttcattcatatgataactatagttattagtattgatattgttattatttgaatattcatcaattgaaggtataaacgtttgggaattttgtggattaaattgatattctttattagtaatcttttgagtggtattattattattattattattattattattattattattattattagtgttgttaatatttttcttattatcattataaacatgagctaaagcacatttaacaccaaatttacaattacctttttggaaatatttgcaaatttgagtttctgaagttgtatcaatttgatgagagaaaggacatgaattacctgcttgacaagtaccttgacggtaaaatttacaaggtacatgagatagatctatattagttagtaacattgctttttgaaaagaaagagagtatataagacatatagttatgaattatacatactttttgaaggttgatttttgttattgatctctgttatcaccgatactttctgagaaggggttaaatttgaatttttaagaacattaattatatccatatttgatggaattggttcattcattgtagcgtttagaagtatttatttgtatctaatatgtatgtagggtgtttatatctgcttgatggattaaaggaaagaaatgtagatgaatatgggttgataacgataatagttataagttaattaattaattaatttaaaaaaacccacagtttcctaataagtgagatgagataaggaatttgttagatttttgttatctatagattattattattattattattattattattaattatactgactaaatagctattttatacactatataaactattcattataatgataaactaaataatttggtaaaccaataacttcataacctaatcttttacacattttagcaaaaccttcagtttcaattaaatgataaaatgggaaatttgggaacattgcaccatctctatgaacatctgccttaaccattaaacaagtaccaccgacaccatcaaggaacatttcatcattaatattaccatttggatcataaaaatgtgccattaaaggtctataagttgcaatttcttgataaccttcaacaattatttcatcatcaggtaaatttgctgcaagtcttaaaccttcattactttcagcccaattattataatcataaggtctaattgaatttttcttttcattttcatcataatatctttgataacaatttgctgaaattacaggtttatcatgagctgttaaatcttgaattaaattttttggagtttcaacaatatctgaatctaaccataaaacccaagaagtgaaatggtaccaattgttgaaaataataatgaatttctagcagttgccatttgagaacgtctctttttttgattttgtaaagcatgtctatccttttcaagttgactctcaggtagaatcattatcttgtcttaaaattgtaattttactaaattttttaatattatcatcttttgaattttgaattttataaatttctatttgtaattgttttaaagctttatcaccatctaaagttcttggtaatataaaacctaattcaattaattctcttggataatttaaattaagtaaattttcccaatattgtaaatggaaattagccattggtgataaaattaagattttttcattattttgtaaaggatttttagttgttttaacatgaatttaaatcataatgagatatatgattatttggtaaattttgagggaaccatttttttttctttttatttaaagaattagtatcagaataaatatagggagaattttttctattttctaatattagagaatttgaatctgaattattctttgaagaagatattaaataatataagaatatgaataaacatagtgaagatattattttaatatttttatttttagttgcttgatatttaagcatttgaaaaaatgacatattgtattatatagtgaagtatatgttatatatactattgttaataatataaagatactttaatactatagtacaatatgaagattatgacaataataaaatccaagatcaaaattaaaaactaaaaacttattaatccttattgatccaattcctgaagtgtaaaaaattacatgcatgttgtgtgttgacatttggtgattataatagataatactaataataaataacttgcattacatcatcaaaaaataaaaaaaaaaaataaagaaaataaaacagtcagtcgcgtctgcagtcacgtgaccattacataattaaataaatttatttaaggactccgatctaataaccataataaaatgacataaaatgacataaaatgacaccccctcttatagtaataaaaaatgataaaaaataaaaaaggaaataaaccaccccgcattgtccttgaaaaaaattttaagttattttaaaactattttaatagtattaattctattcggagtacgatggggggtgtatattctattatattacagtgtatcaacagctgattatatctcttaagaggggaaatttaccctatattacactatattactctatattaccctttaaatgcccttaaactaccctctttccgctatcctttattttaataaaggtataaaaagggtactatacccctatttatcatttattctttaatctagctagtatcttttttttgattgtatcgtatcttattatattgtattataatttattataattaacacatacacacacaatgtcaaatcctccttccttccatcttaatgaaaaccataataataatatcaataatgacaatcattctgtacatagtctagattcaacggctgtaacaaatgataaagatcatttaccaaatgttgttcaatcttatacaaataaatctttccgtcatgatgatgatcatatttatattaatgatataccaattaataaaaaagaatttactctggcatttggtggtgctttcgaagttggtccaagagagaaaactagagaattaattgaatatgcaaatccagttccagctggtttaggtgctttcagtgcttcagctatttctttaggtttagttcaaatgcatgcaagagaagttcatatggcaaattctttattaggtgctttcttaacaacttcaggtttagttgaaattattgttggtgttttatgttttgtaattggtaatacttgggcttgttgtactttcctaatgtttggtggatttttggtcaagttatgcatttgttttaatgaatgttggtggtattgctgaaagttattcaaatgaaaatgaatatgctcaatcaattgcaatattctttttaccttgggctttattctcattttgtttatggatttgtacatttaaatcaactgttgcattaactgttttaatgtttttcatttggttatttgttttattatttacaattgctcaatttgcttcatctgttttaggttttcaaagctggtggatttttcgcaattttagctggtgttataggtttctataatatgcttgctggtttagttgataaatcaaatgcttatttcactattcgtccacttcctttaccaaatcaatatgatcctgcaaaagaagcttaacttatgtattacttaatcatttatatatcatataattatttaattaaatttttgctctaatgaaatgaaatgaaaatgaaaaatatatatagcatgttacatagcatatactcggctgaatttcgggattattattttgaaatttcaaagttatttattatatataggcttggagggtcccattatgtgaaattcatggtatacataattattccattatccattcttctttattacttcctacttctttctttatcttatacactcgacaatgtttgcattacctaattgggggtttagaaatacagttcatgcttatcattcagataatgcaattaaattacctttaaaaccattaactgaatcaaaatcattcatcatccgatgacaaacaatttatttcattagataaatttgtttcaactagaattccagatattaaagatggcgcaaaacatttactgaaaccttatttatttaatggtgcattacaaacattgtatactttcaaggcagatttccataatcaatatcctgtttatttcggtcgtgaaattattgatataacagatgatgaagttattgaatttaaagatgaatttgatgatttacatgcaggtcaatttactcttgattatgtcgttgatccaccaactgaggaattaaataatgaattttttaaaaagaaatgtttggaaacattacctgaaggttatccaagattacatccacgttgtagatattatacagataatgaaattaatgaattaaaaaattcttggattaatgatgatttaccaattagtattattgtaccaggtttagcaggtggtattcaagaagcaccaattagagcaacttgtcataaattaaaaatgcaaggtcatcatgttttagttttaaatcaaagaggttgtagtcgttctaaaataacaactccttatctttatacaggtttatcaactgatgatttgaaatatattttacatagattacataaaagatattcttcaaataataaaagaagacaatttcatgcaattggttattcatttggtggtttacaaattgttaattatttagcaaaagaaggtaaaaattctttattaacaagtgcaattacaatttcatcaccttgggatttaaatgcttcaatgaaacatatttctgaatcagttagtggacattatttatttgaaccttcagttacatttttcttaatgagattagttaaaaataatatgaaagtattaagtgaagatcccgatatattcactcaagaaaaatatgataatttgaagaaaaaaattaaacatacagttgaatttgatgatgaatttacttgtaaattagttaatttaccaagtggtagacaatattattatgctgcatcacctgcactgagaatttttaacattaaaactcctttattagttattaattcaatggatgatccaatgatttcaactgattatccttatttagatataattaaacatccttggatttatatggttacaactgatttaggtggtcattattcatttattaaaaataatggagatttttggtttccacaaattattgaaaattgggtagaatcttggaaggaaattgatgttcaaactcctaatgatattgatgataataattggaatattgattcaaagataccttacttgtaagcaagtcttttataagagaaactatctgtaattacgtaatttatttgtaaatttgagaaaaaaaagttttccatcattaagaatgagagtatcccattttcgcagtctttggaatataggaccttacaagaagcttattttccaaaaggtaacaattgtttcaataatgtcagaagagaaggctgttaatgggtctaaaagaaagacaagaagtagaaatagaaataaaaataaaaaggaagatgaaaaaaatgatgaaactgtaaattcttcatcacctgtagttgaatcaaaatcaaaggaagaaattgatgctgaggcagccaagagaaaaaagaagagtgaaaagagaaaaagacaaagagcaaataagaaacttagagaagctcaaaatggtgaaaacgccaataatgatgatgatgcagataatgagccattaactgattcatcagttgaaaaattaatcatttcatctgaaaaagaagtcaaggaagagaaaactttaaataatgatgaagaagaaaaaagaaaacgtaagagtgaaaagagaaaaagacaaaaagagaacaaaaagttaagagaagctgaacaaagaaattcaatagctgaaactgaaattaaaactgaagaaacaacaaatgaatcagttataaagccaatattagataatactgaatttgatgaagaaactgaatcatcaaaggatagtccaattattgaaagttcggcaacttcaacagattcaaaggaaaataatcaattaactttaaataaaccagttagatttgaatattggtatttatgatacattagaatttaattgtgattgttgtccagttgaactgaatggttttaaaccagcaactttccattgtgaagaatttgaacatttcaatatgtcagtttcatataattcaatgactgattctattaaatgtcaatcatgtggtgatattgaaattaatgaattaaatgcaattttaattaatcataataatagttggtattgtttgtacatcatgtttagcaaattcaggttatgattccttaatttattcaatctctcatgatcaaaatgaatcagttttaaaatttgttgatcatatgtatcgtttaagaagtttaaaatgtacaagttgtgattcaattgataatttaaaaatttctgaagatataattccttattgttcaaaatgtatttcaaatgataaagatctacaaaatgaaacatttttcacatttgatgatcctttatttttatataaagtttttgaagatgatgtttatgaaagttttaagaactctattaatctagatggattcatctgaaaaatctgagaagtctggaaagttggagaagtctaagaaagctgaaaactctgaaaattccaagaaagttgaaaagtcaaagaaagctgaaaaagctgaaaaatccaagaaatctgaaaagtcagagaaatcaaaaccagtagtcacttcattaaatacaactgaacaatcatcttcaaagaatgaaaagaaaaagaaaaagtctaaaggcactacagaaacaccagctccagctaaacaacaacagaaagtttccacagaaagtactaaatccaaatctaagtctaaatctcaaacaggactcaatcaacaacagtcatcatcaattccaaaggcaccagcagcgaaaacttcaaaacaaaaacaacagcaaccagaaaaatctaaagcttcaaaaccatctagattcgacacttataatgattttacccctgaagaattatcaattgaacaaaaatttgaaaaattaaaacaaattgttaaagatacattaccaagagataacagattaaaatttgacaatatggatgaatatcttgattatttaacttatagtttgttactcgaagaattatactctgttgatttctgttccgatgttgaactttcttggaaaaataatgcagaatgtgttatgacaggttcaactcaaacatggtttgatatgtacgttagtgaagatatgacacatttgaaaaaacacccattcaaaagagatcaaccaattttcataattagaaaggaagatatgaatttagattggtatactaaacctgaattttgggctgcaactgttgttggaagtacattagcaaaacgtggtaaacgtggtaaaactgaaaaagttaaaagaaatgcatattcaaatagaggtagttatacatcatcatttgatttaaagctattcccatggaatagcactccattcctgttaatgaaaatggtgagaattttgcattccttcctgctagtgttgttcttggtagagttatgaattcaatgaatcaaattgaaaataaagaatttattaatttaattttaggtaaaactaaagttaagaagattaaatttaataataaaatcaagaaaaatttcaatattttaaatgattctcaaaaaactgcattacaatctgcacttaataattcaattacaatcttacaaggtccaccaggttctggtaaaacttcaacaatttatgaaattatcttacaattaattgatcaattgagctattatccaattttagttgttgcagcttccaatttagctgttgataatattgcagaaaaattaatgccacaatataaggataaaattctacgtattgtttcagcttctaaggaaaaagaatatagtagagatcacccattaggttcagtctgtttacatcataagatttcagatgttttacctgataatattttcaatattggagctaaattaaaaaaggattattctaacgttaaaccattagaatttggtaaatatttagattcctgtaaaagatacgaaaaacaatctatcaatcaagcaaatattatctttgcaacaacaacaactcttgcaggtccatcattaaaggaaattaaaaagatgccagtcattattatggatgaatccactcaatcatcagaaccatcaacattaattccattaggtgcaaagggatgtaaaaaagttatttttgttggtgatacagcacaattaagtgtttttgctagagttaaatcattagaaatgtcattatttcaaagggttattgaaaatggtacatatgaaaatgttgaaatgttagatacacaatatagaatgcatcctgatatctctgaattttcaagagaacaattttataatggtgaattaaaggatggtataacagctgaagatagaaagaaggaaggtattaaatatcctgtttatttctatgatcatcaaggtattggtgcaaaagaaagtaagaaattttcagtttctggtgaagaatttggattttcttgggttaatacaaaagaagttgaatatattgaaagaatggttgttaaacttgttgttgaacataaagttaaaccatcaactattggtattatgacaggttatgcagctcaaagagagttaattgttaaaactttagaaaataataagattattaatccaagtcatgttaaaactaatgttacaattgataaagaagatattactgataagaaaaacgttacagtttgtaatgttaatggtattattgttgcaacagttgatgcatttcaaggtcgtgaaatggattttgttttaatgtcatgtgttagatctaatagtgagggaaatattggatttatgtcagataaaagaagaatgaatgttgcatttacaagagctaaatatagttttatcatttgtggtgatgcaaaatgtttatctaacaataacttatggaaaaaatatattgaaaaacagagagcaaaaggttatgttaaaaatagtttgaatgactattgatcatttaatagcaataatttataaaatgtaacatctagatagatagagtctatattacataaaagtaacatagataaatattattcactaaactttcggaatatcagttagttacccatattggaagttaactccgtcaaaaagttctgtactctatattgtttagtgattagtctttatccatcgatatcatgtattttctgtataaagctacataacatgtatccatgttcacacctcaggtattctcaaaatagatacatcataaccgaaagattcacctcattaattaatcattatgataagaaaaataccaagacaatttttgatgacttgacatagcctccaccccacaaaaaaaaaacaacaaaggaaaatagaaaaaaagacgttatctccgtcggagtgtactaattatgtttcaaaagcttgttttccctattcacggggtatttaatggaaaggacgcccttaactatacaattagggcttgtaaatttttgatttagtttggtaaacttacacattatcactactaacttatactaaatgataatgaaggggaatccagatgatacaggttccattaaaaatacttcttcggaggaagctaaattagatttagaaatgcaagattttaatgatcatattcaaagatcagttactaatgatccggaggataatattatgactagacttgctacactttccaaaacactatctagtaaaaatgcaaatgaaatggaaactttccaaatggataaagatgactttaatttagaatcaattttaaactatattgtgaaattcaacaaggataatggatatgatatgaatgaaattgatgttgtgtttcaagatttaactgttactggtaaaaatactgcagcttctgttttgaaagatgtcaccgatgttttctttaaaccatttgcaatgatatataatagaattcaaaataaaaagaataacaatgctcatagtctcaaagaattaccaaagacaagaaaaattataagaaatgtcactggatttatagcacctggaactcttacattggttcttggtagaccaggtgctggttgctcaactcttttgaaaactattgctggtgaagctcatacttataaaggtattgatggtaatttatcatataatgggattgataaggatattatgtcaaagtatatgaacaatttgttggtttataatcctgaattagatgttcattttgcatatttaacagttgaacagaccttgaattttgcaattacttgtaaaacaccaaatattaggtatgataataaaactagaaaagaatatattgaaaatatgaaagatttacaagagatactatttggtttgaaacatgttgaaaaaactttagttggtaatgattttgttagaggtatttccggtggtcaaaggaaaagagtttcaattgctgaagctatggttaccggtggttctatttattgttatgataatgcaactagaggtttagattcatcaactgctttggaatttgtacaagctttaagaacatccaccaatatttacaagaattcctcaattgttaccatctatcaagcatctgaaaacatttatgaattatttgattatgttacagtgatgtatcttggtagacaaatttattttggtcccaccaatgaaggtgttgcgtattttgaaaatttgggatttttgaaacaccctcgtgagacgagttcggaatttttgactgcaataactgatcctaatgccagaaagattaaccctgaattccacgatattagtattattccatctacagcagatgaatttgaagcactttggagaaattcaaaagaatttgtacaattacaaaatcaaatagatgaaaaattaagaaaatacactggtggtgatgatccattgcaaagacttaaagaaaacgaaaaacttatcaaacaaaaacatacatcaaagagatcagtatatacggtcaactatctaactcaattaaaggcatgctgtaaaagaaaatgggaaatcattttgaacgaccgttcttatccaattacgttagttggtgcatcaactgtacaagctttagttatgggatcattggcttacaatactacttattcaactgttggtgcattttcaaggggtggtgctcttttcttctcatgtttctatttcgcaattatggcattggcggaaactccatctttatttttggataaaccaattttaaataaacaatacggctacaaactgtaccatccatcagctgaattacttgctaaacaacttgttcaatttcctattcagctttctgccattgttatttttgcaattgttatttactttttggttgatttgaaaagagaggccggtgcattcttccaatatttggttattgttatattgattgttcaagcaatttattctttatttgcactactttcagcattaatgccaaatgaatccgctgcaatgggtatttgtggtattacaatgatgtcaatggttatttattcttcttatatgattcagagaccttcaatgtattggtggtttaaatggttttcatattgtaatccaattctttatgcttttgaagctttgattacaatgcaatttcatcatttggaaatgccatgtacaccatttcaattgattccaaatggtccgtcttatcaaaatattgattcaagaattaatcaagtttgtggttttgttggtgccgctgcatccaaacaaatctataatggtagaaatgatgttaatggtgatatttatcttgaccttgcatttacatatagttttagtcatgcttggagaaattttggaatattgtttgcttttatctttggttacattataattgcatgtatttctgtggaaattttcaatcctatcattccatcatctgataagttattatttgttaaaaatgcaaaaattaccaataaaatgtttgaacatttccgctctattgctgcagaggaagataataatatcgatgtggaaaatattggtgatgacagtttatcaaaggtggaaaccatgctgagtactagtagcagtgaagatcacaaattaggatcaaatgatatatttacatggcagcatattgattactcagttttgtatgaaaaagagcagagaaagttattagatgatgttcaaggtttagtcattccaggaacattaactgctttaatgggtgaatctggtgcaggtaaaacaactttattaaatgttttatcaagacgtactgatgttggtattgttacaggtgatatgcttatcaatggtcagctaatgggatcatcatttgaaagaagaacaggttatgttcaacaacaagatattcatattgctgaacttactgttaaagaatcattattatttagtgctagattacgaagaccaagaagtgttccagatgaagaaaagattgaatatgttgaaatgattatgagaattttagatatggaagattatgctgattctattgctggtatttccggttatggtttgaatgttgaacaaagaaagaaattatcaattgccactgaactagttgctaaaccttcattactattattcttagatgaaccaacttcaggtttagattctcaatcttcatgggcaattgttcaagtgttaagagatttagctaaagcaggtcaagcaattttatgtacaattcaccaaccttctgctacattatttgaacaatttgatagattattattattgaagaaaggtggtcaaactgtttattttggtgatattggtgctgattcaagaactgttattgattattttgaaagtcatggtggtagagtttgtgataaaagtgaaaatcctgctgaatatattttagaggttattggtgctggtgcaactgcttcagttactgatgattggtttgaaatctggaattcgagtgatgaatatagtaatactacaaaagaagttgctgatttagttcaaaagggaagttcagttgcacaacctgatgatgaagatcttagttcaaaatatgccactagttatccatatcaattttatcaagtcttaaacagaacctttactcaaatgtatcgttctcttccatatataatgccctaagttgggtttaacaactcttggtggtttattagttggtttttcattttgggatattaaatacactgttattggcatgcaaaatgttatgtttgctaattttttaactattgttattagtgcacctttgatgaatcaaattcaaactcaagcaatttcatctagagaactatttgaagttcgtgaaagtaaatctaatacatttcactggtcatgtttacttttatctcaatatttgaatgaacttccttattgtattgtttttggtactatttattttatttgttggtatttcccggttcaactaaattatgacgcaacacatgccggtttctggtggtttaattatgcagtttttcttccaattattttatccatcttttgccttaatggttttatatccatcaccagatttacctactgcaaatattttattgggtttattgttcagtttctgtattgcattttgtggtgttttccaagagacctatgcttatgccaggattttggaaatttatgtggagagtttcacctttgacttattttgttagtaatcaattagctatttcattacacgatagaccagttgtttgctctgaagaagaatataactatttagagcctcttgaaaatatgacttgtggtgaatatcttgaacaatatttccaaactaatacaggatatgttaacaatccaaattcaacaactaattgtcaagtttgtcaatataatattggtgatcaattcttggaaagtattggtataagttatggtgacagatggagaaatatcggattcttttgtgcttatattggttttaatttatgcatcatggttacaggttactatattttcagagtaagaaaagcatcacctaaaggttttattaccttcaatcaagtccaagttttcaaaaaaatgaatttactctctataatctatctatatcttgtctttaattttaatataaaatagtataaaaattaaatatctaggctttggaaacatttgttttactactttggaattgtggtgcaatttcttgtaaccattccaacttaattgctgaaacatttctagcatatcccttaacagtataaacaaattcaatgtacataatgcgcatccttctttttaccaaaaagtaatgacgaaggatgtaccgatattaaattaccattcgtcacagttctataacttctatctggcataccaattgcgctattggaaataaaaccataaagaaaagatttcaatattgaatcaacatcaataatactattggttatagttctacccatattggtattattgtcatccctgaaatcattttcattttcaatatcatcatcatcatatccggaacctaatgagtgcatatattccttaatttgtttccttattcttgaaacattcttgaatcctttatatgaaacagaaatatctttacaccatttttttctctcatcattttctttaaaggtattgaatatatcatagagttctttcaacataattaaatcaccatggttagtacctaatggacacgaatcactacgtaaatgattaatttcatctcttttttcacttggaggattcattaacaaattatcgactgaaagacaagatacaatatcaataacatcattcaaaacattattttcttgtgctttaatcaatacagctgctaaatgaggatgcaaccggtaaagtcacaatcttctcacccaatgaggtaattttacctgaattattaagtgcacctaatgaatacaattgttgtaatgaagaaaccaaagattcttttcccggattttcaagccaataccaacctaatatatcatcaacacccagcttttttcaacattaaaacaggtgaaataatttcagatctcaaaatttcaggttctgttgtatctgtaagtttcaaataatcagtttctttataaagtctgaaacatttaccagaagattctctaccagctctaccagatctttgagttgcagatgcttttgaaatcggaactgtcaaaagtgttgataaacctaattgatgcctccaaactttaacttttctcaaaccactatctataacatatttaatacctggaacagtaacagatgtttctgcaatatttgttgatataataactttacgttgtcttgattttaagggagcaaaaattttcatttgctgttgaggaggtaatgcagcatataatggaagtggaacaatcattggagcttcttttggaagttctggtgaaatgttagtaagaatctcaacagctttatcaatatcttcttgacctggaagaaaacataaaatatcaccagattgttctccttgattaacttgaacaacagatttgaccaaggtatctataatatcatccgcagctttgttcatataaaatctttcaacaggatacattttaccttcgacaaataagattggagcattgtcaaagaaagaagaaaatttttcagcatctaaagtagcagacatgataataactttgaaatttggttctgcacctgctacaacaccttgatttctttcaattaataaacctttcaagaaacctattaataaatcagttagaattgttctttcatgggcttcatcaactacgattgtagaatatttggataatttaggatccatcatcatttctcttaatagcataccatcagttatatatttaagtttagttctagaagatgtaacattattgaatctaacggaataaccgacttcttcaccaacgtgacaaccatattcttcagcaactctcattgcaagattcatggctgcaactctacgaggttgcgtaacagctatattctttttcactttgtccattaagaaatgtggtatttgagtagatttaccagaaccagtttcaccaattaaaattgttcacaggttctttcattatttgtgggattatatcatctttaaccttgaaaactggtaaagtttttcttatttcatacaattcagcggctctattctttaaatcagatctagtcatattataatcttgttggaaaaattcatcatcactatcaggattttctttcgtatattcatcatcattttcagttgatttatcatcaaaataaacagttttgtaaccattttctgtcgttactttattttctgtgcttcctgtgttattatcattatattttttagatctcttcgatggtctttcactgttatcattataattattattaatttcattattctttacactattattgtcaatgttttcattcacattcgaaggagtttcatactccgtgtctgaaaacactatctttttattttgcttttgtctacgccccatttatttgtcctggcacccacacctaccaatgttatcacacaaactatacaaacttaaaagtacattgaaattcatgttaagaaatttcaccaaccagacttgaaaaaattcacactataataccaactcttagctaacaaagtgaagaaaaaaaactttttttccttcccacagttaacgagcccccctcggaaaatcggtggttttcaaagtttttttttctaattttgcgaggagatattggtattgtcatgaaatttggacacaacgagttaactggtaggacacgttgcttcacattttacatctgttttcatcactttttcactctgttcaaggccgattaccaatgaaattgactcaatttgtgaatatctggttgctatttgtcacatctgtgctggctgtccaaccttttaaaaaggtatgggaaaatactcaatattctagagttatagatgttggaaaatcattcgttaaagaaagacatgatatacaagttactaatatagattcagaacctgcaattcaatatctttttggattaccaaaacatatgagttccgatgcaactcttgtggttgcaatttatgcaactaaagatggtaagagagctttattaaaacctcaaaaaattccagttcaagatgaggatttaacatattttgatcttaaattcccatatccaattgctccaggttctacatttgaatttatcctttcatttatgattacaaatcaaatggttccttatcctgaacatatcccaatggaaaagactcaagttataaaattaaatacttacgcttatccattaacttcatatgacactatttcttactcattagacattgcaaatacaaaatctgtcactgaacttaacttagatgatttaccaattctttttgaaaaagtcgaaaatgaaagatcagtttcttttgttgcttccgatttaattgaagggaacacagttcatgattttacatttacctatcctagaaacttacctttaacttacattaattatttacaaagagatttgtgggtttcccattggtcgaatacccttcaattagaagaatattatgaacttacaaatcatggtgctaaattagataaaggattctcaagatctaaatatatgactgaatctattgctaacaaaccacatcacgctattacagctttaagaataccatttgatcattcaaaggctttacaatatgattctatttattacgtggataaagttggtaatgtttcaacttctcaatattatgaaaatgaattaattattcgtccaagattccctattttcggtggttggaactacaattttaccattggttgggattacaagttagatcaatttgttaaacaacaagatgatgaatatattattaccaccaaaattcttgatggtattcaagattctacatatgataaggtcaactttactatttatttaccagaaggcgctgaattacttgactatgctttaccatttgcagttgcagaaccaactattactaatcaatattcttacttagatgttgaatctggtcacttaaaagtaacgtttgaatttgagaatttagttgatgaaatgaaaaatctttcaattgttattcgttacaaatataccacttatgcaatgttacataaaccattacatgccgctttctacattttcttagctttaatgggtttatacgttctcaaaaaaattgatttatcaattaaaccaaatgagaaatcagataatattgaatctgaagaagttggaatcatcgataaagatgaaaaatctgaaaattaggactacaatcttctagaaccatttgcgactattacttatttgaactttaaatgttatgtaaatggtaaaaattatgtatctataaatctattaaatcattatcacgtttggtatattgtataaatgtttcagaatcctcctttttatctgtatttcctgtagtttcaactgactcttttatatactgtgtattatccttgtgttcatacgccccttcatcttctttactcaaacttcctgcagtttcctcagcgtcatgaatttccttgatattctcccctgattcaattccatcagttttatcagtattctcattaccgtcatcatcaagcccatcttcagattcttcatgagttttaatttcagtttcattaggttcaatttcttcattaactttaatctcgtcaactttttcatctattggaatttcttcaatgatttcaggttcttcactaactctatctttttcactagttgcatcttcacttttaatttcaggctcctcattagtaacaacttcttcgtgaacaccaagattttcagtaatacgaacttcctcattaaaattacattcttgaatattttcagattcttcaataactccaagttcttcattagtcgtagtttcattcaggatttcacattgttcttctttatcatccactacaccatcttttttatttctagttccatcatcatcattatcatcaacatctttagtttcaatgtcaattttttcttcactcccatctgaaacttccacagttccaaatacatcatcctcaagtcctttagtgatttcaacatcttgtttgacctcttctttaatacttttcacatcattttccttctccaattttttgtcaactttatctttaacctcttctttagattttatattttcattctgaattaatgaagctgaaaattctatcttttcttcatcgtctagaataagtgtttcatcacaatcagtgttttcttcagttatctcccctatcaaattattattacttgattttttatgtttctctttacttagcttcatgatttgttcaaccatttttgattcatggatctcttttttctttttatgttttgaatttttgattgatgatttttttctattttctcttttcttctcttcatcctccattcgaatgttgtacatatgcgcctgtttgtattcagcaacaaaagaaacaaatttcataaaaaatgtgtttttactattcttatcattaaaatcttctgcataatatgtcattgtagtttcaagattatccattgtataatcaaatctttcctttaaatctaaggccttcttctgtgcatgatccatgattttaccaaaatattcaataatcttatcatcaggatgtaacttagacttatcactcaaagatccatttttaatttgcctagatgaactgttaattagtgaaataaaatcttccacacttttttgaacatcatcaatattaagtgttgcaattttattgacatctgaaagtgaatttgcaaaatctttatattctgggaaatgtgttctgactgttttctcaacatattgcatcatactcattttatttgtagtatcttttaaaaatctcaatctttgtaaagtagacaacttgaaacctagtgctatttttgaatcatcattcatgaaatttccaatatttttaattaaagccagtatctcaacaagtgattttgatgattttaatttatccaagccaccttgaagtaaattcaatctgtaaataatatcattataatctgattcataagtaattgcaacaaacaatgcacgcgaacgagccttccaataagacgacaagttataacagagttcgacatagattctatcatatctttccaattcatttggatttttcttcgatagctgtttttcctaatttgtaattggttgaatatggtcctaaatctttcattaaatttggtgtaagttccatggctgattcattattgaaaaattcaataacatgagaagctttagtcacttcaggatcacaactcagtactttcttaacaaaatcaactgctgataatgtattaaattgatgtaaattgattgcaaatgtttgtttcaagtctctaggtaaaaatgttacttttgaagattgaggttctttggtagtttcagtccttttcttcttgactattacttccttcaccttaaatgaattttcaatttcagccaaaattcccctctcatcaagaattttgttaatgttttgatcatctgaatcactccaaagagtattactaatattttcaattttatcccaatgaacttgcttcaattttgtttgtgatcttttcaagtgttttaattgatctaacttctctgtattcggatctttgacgagttcaacaacaggtcttgatttttcttcatctaaaacttttggttttgaaacaggtaatggcggaggtgggggaggaagagtatttttagctttaagattcatcgaaggcggtaaaggtggcggaggaggtggaagtaaaggtaaagattttgctcttgttgggggatttggattggatgtaccatctgctaataatttgagcggtaaaggaggaggaggaggaggaggaggtggaggtggtggtggtaaaattgatgcagaaccattacgaataccactaccttcacctaaaccaggacccaagccaggacccaagccaggaccactaccttcacctaaaccagatcctaaatcagcacccaaacccggacccttacctgaaccattggcagaaccattaccagaaccattacctgaaccattaccagtgccattaccagtgccattaccattgccattaccagggccattaccagggccattaccaggaccattaccaggaccattaccaggaccattaccaggacctaacccaattcctgagccaaaaccattaccggggccactcgggccaaaacccagtccattaccgtatcttaaaccagcaccattgccagcaccattagaggcaccattaccggcaccattaccggcaccattaccggcactattactgggacatcgaccagcacctgaaccattttcagttacatttccaatacctggttctacccctgaaccatttccagcacccataccatggccattttcataaccacttcctaaatctagaccataatttgactttaaatttatattaatgccagaaccatggttgtagttaatatattcattacctgatgtattatttgacgtacgtatatcataaaaatcatagggttcaaaaaatgaatgattttttaaagtttctgcactattttcggttactgatctgttaatatttgatccaatataaccatatccagatccataaaacttattatcgccagaaataccccatttggtgtttgtttctgtaattgtagatgccttatatgttctttgagaattagcgcttgagactatatcgtatcttaatggggtatcatcaatggcattgttaataaaatcaagggttacgtctggagctttaagtgaaagattaatattttgattttggataaatgacgtatcatgtgggtcaaattgttcaccaatgtagagttcttctttgatatcacttctgttagatttaatctcaccaccctcttcagaatattcagttttagtgataagttcaagattatatttagaaagcaataatctaacagctttcctatcattctcaaatttgagtaaaagaactccaaatatagactcagtcaaatctttattctttagtttattgtcaatcaaaaatgtggcaaggttttccaattcatcgtaaaacttctggttttcagcatttctgatttttaaactttctagcttctttaccatctcctttacattaccattggaataaatttctatggtggataatgactttgtagggtccaaacttttatagcttatttctaataaatcatcttctttggaatgataatattctttgattaaatcattgatgggattattgctcaatactttactatcattgaacaattgtattaaccctgactcttctagtttacttctcaatgaaactcttgaacgtatattagcaaaactattaacagtttcacatatcaaaaaaattgtaagcatgatatattcttcaattgagctctcatcatcatcaaaagataaattatattcatgaatatgtagcagttcaatagaatttctgatccacaaagaaaatggatctactgcattttcactagaacttaaatcacttcccctctcttcttttaccacagatagtgaatttaattctgtgatttttgtcaaagtttttaaaaatacttttgaacacaggaatccatttttaacaattaataatactagcacacccgttgctaagttcatagattcgattttcggagacatcagactgtatgtaattgtttcagttaaaaccatcaatgtttcattactaatgttcaaatcaccttgttgtaatataattgattttataatcgacaacaaataaaattctaacttcaattgagtgtttgactttacagatagtgagttgatcttactgagttcctcatttaaaagcacaaatccatttgagtttaagaaactgtcaatccacaaacgtaaatcgtttgatttaagcacaccacttatcattttatccattaatttataatgtttagttttcatttcttttgataataatttgtttataaagtactgtggtgtaggcaaacttggttctgcaagttgtttcggagtcggcacatttattgatgaagtggaagagttataataaatattatctttgctcgaatcatttgtacaaagtatcaaatgtttattagtatcaatggatatgtcagattcaagaccatttccaacaagttttaatcccaaagttgtgtagcttttaacatcgagatcattagagatatcagaaggattatcaaaatccaatgtatgaatgtaactgttctcaatctcctttgtagtatcatcaacttcagtattatcattttcattattttcatcctcaattccatttgatgtggttgatacggatgacactcttgaggtgattcgttgtattccatggaatgactttcttcttaatttttcaagtcctttgttaaatttctcagaaacagtccttcgcccatttgatggtttattacttataataatcttatcttcaaatgttttttcgttactgttaaatggatccaatgattcgtattcagttgatgatagactagacctcctattggaatccttaaactggggatttatcacgtaactttttttacggtttggcatatatctatatttaattgttttagagatacactatattcaaaatgtatcacaaatgcaattgctatgatactttcttgttattctccttctctagaaaacgtttctgactttgttgatgatttaacattggaagaaaaattcatgtttcatcaatgttttgattcggcgttacgcgtttgaactaaaatccgaaatatctgaatttaaggtacagtgtttttattttataaaagttctataaagtagaagatgtagtaaagaaattacaagtttataaacattagcttgaaacattattagactcatctattaagagtttattcatttctttgtttgcattgtaccaattttgaaattctgctttttcattcatgaatttttgtatattatgaataaaaaagttaagttgtgacataattgtccaaaaactatcagaattaacatcaggattttcacaatttattgatgaaacatctgctgaaaaaatgtcaaagtttttggaaaggttgtttatcagtttaccaaatataagtctgacatttggatcagtgatggagctaaccaaatcaatattgtaagaattagacatatcaacaactaactttataaattttttaggattattcaagtattctttaggaactgttaatttaatgtaaagtttttcaatgacaatttgatcacaatcatcaaactcgagagtaagattatcatctttgaatagcaaaaataatttatagatgataccttgagaattatccttaaacactctaatagaattacctcttaatctttgtctgaatttttccaattcatatgtccttaatttgaatttttcagggtctaatgccgaacttatcagttcatcatgttcctttttctttctcttttcttcttcttcctttttaactctctcttcttctaattttttttttctcatcagcttctttctttttgttcataaccttgacaagtttaatagtgtctttcttctccatggataagaatttttcaaggtaaacatctaatgtactaatcataccaactaaatcatttccacctacaacttcaattttcaaaacatcgtcatcttcatttccttcaatattttcagatgtttttttatcattctttttatcacttttattgttatcttttatagcattttgaccctttcctagcatttctgttctccaaaacagtttctacaattttcttaaatcctatttcgatattaacactaaaacctcttggaatatcatcattcaaaaccattattgtaggtgaaggtaatttattaggatatgtttgaggtatacataaagttaatgataataattctaaatcatatgggaaattaggatctgatggtttgataaaaaatgtcataaaaatttcatcattattggattgatctgataaaatgctatcaataaactttattggttcagttgaaagtgatttggaaagtataccattaatggtgatgggatttattattggtaataatttttcaaattcttttaataatgcatggtttttgtttaatgatttattgtgtctgttattatttgacttactcttacttgaatttttggaatttgatttagattttgatggcctagcttggtttgtatttgaaatgacagtttgaaggtgaatgttgagttagatgatccttgttcttgatcagatttagagttattggttttatttttatttttatttctatttctatttctatttctgtttttattagtttttattattgctattactagctgtgtttgatgaacctgttttccacactttctgacattatttgatgtgtgaatatacttatacaagcttttatccagaatacatcaggaagaatataaagttttcattaaattatttatgatgaaaaaactatggtaacatgaatttatttaataatattacgtaagcagttttaatgtatatttctggattaggaaaaaatatcttaattttcaataaggctatagaggatataagatcattagagtttgttgtcgttaattataaatcatcattgttacattatgtataaaaataaaaaaaagataaatttttcttagctactacagcttcatcatgatatttattccttaataaataaacttgcagctccttgcccaccacctatacacatactaaccacacctaattgaccaatttcaagttctcttaacaaagtacataattgtcttgcacccgtacaacctaacggatgacctaaagcaattgcaccaccacgaggatttactttttcaagatcaatattattctttttaattgaaaacaatgcttgacctgcaaatgcttcattaatttcaaatacagagatatcatcaattggtacaccacattgctctaataaatgaggaattgcaatagcgggaccaatacccataatatcaggtggtacaccaacattagtagttgcaatatattttcctagaatattcaagttaagagatttagcaagttttctggtcattaacaagacagccgctgcaccgtcagatatttgagatgaattaccagcatgtgatgaaccatcttttttaaaggcaggtttaagtttagacagtgattcaacggtgacaccttttcttggaccttcatcagtttcgactattttagatttaattgaaactttcgccatcatgatcttttgctttaatatcaacgttaatcggtaagatctcatctttaaataaaccacttgaaacagctttttctgctttattataggaattaacagcaaattcatcctgttcatttcttgagagaccgaactttgaattaacattttcacttgtattacccattggtaataaacaatttttagcatcatttgaagcttttaaaactgattttgaaatttttggaattgctttaggaccataattttttgacatactttccacaccacaagctaaaccacaattaatttgaccagttaaaattttattagcaatatcattaatagccattaaacctgaagagcattgtctatttaaagcaataaaaggtacagttactggtacaccagctgcaattactgcagctctatgttcattaacaccggcaccggggtttaaaacattaccaactgccacatcaccaattatacttggatcaaatttattatttttaaaaagttcaactaataatttatataagatttcatctgagttaatatctttaaatgaacctttaaaaccttttgtaagagcagtacgatttgcagcaactataactacatcattatcattttgagagcgtaatttttgaacattttgagaagatgatttgttagcatcaccatttggtgatagctgattactaatttgagagagtctttgcatttgtttttgctatatgataagaaataagaagaaatggtagtacaagtattatttacttattaatttgggagctaaatcattattatttaaatataccaaacaagtacacatcaacatcatctaccccacacaatttgaagaaatgactggtgtttctgctgataaaattattaatagcttatacggtaacagtaacggtatattcaagagggggctcaacagcagagttatcccgaaaatgatattatttgaggggagtgagtaaatttgaggtttgcaatgtgtaaatttcatactgaataattcgcgaattttcaactagcacagttttgacacattttaaggctcatcactttgcatattatgccaaactgcttaattataatgcatttgacactattttagtagctttggactggttttatcatatttaaattaggttctaggtcatttatttattcactagtagcaaaaaataaggtaattgatgagtgtgctggggatcgaacccaggaaatcctaagaaaatcaggttctgatcctgacgccttaacctctcggccacacacccatctattttagtacctatttcatcataattgccccctcctctcccatttagtgtcatttttaggcttctagtagtctgttcaacttctatttgaggtgttttattttcaaatagtttgactatcagttttttagtgttgtcttctgtttaactattcctcttaatgttatcttatgttcactttgattgtgtttcggagtttattccatattattttagtgaggaaattttagttatcatagtaagttttttttttttattattgacttaactccgaacgatggaattaacgttcgctcttatgaatcttatacttaacactgtgaaccaaaattgcttacgtgtttacatgatttcagtaatcactactagtacagcttcatctaataacaatctaatggttgaaatcattaaatatgtgggattccctgatggtcattttaaattctcaattcaaacttggctcttaatcctattttggttatcattacctttaacagctaaaacttatagctattattcatatattcaacagtgtctataaaaaaaggaaaagaattgaattatcttatgatattaatgaagttgttatagttgttttaggtgatttaggtcattcaccaagaatgtcatatcatgcaaaaagtttcaaagatttaggttatcatgttaatttatgtggttatctagagagtagtttacctcaatttttatatgatccggataatattgaaatttatgatataccagttattaaaaggaaaagatatttaccatatttaatatttgcatttttgaaagttataaatcaaattttttatttaacaaagttattgaaaaatatcattggtgataatacaagatttgtcctgatacaaaatccaccttccttaccaattttattaataattggtttaattaaaaaaatttgggctccaaatgttcaaataattattgattggcataatcttaattggtcgattttaaatttgaaatatcaaaatgaaaatcatccaattattaaattaatgaaattttatgaaaaatattgtagtttaaaatttgctgatttcaatataaccgttacaaaagcattgaaaaatcatttaatagaggaatttggtttaaattcagataaaattatgactgtatatgatcgtccaagtcatattttccaaccattatcatcacaaaatgaattaaagaaaatcttaacaaataatgaatcattatttaataaagatgtcaattataatcaattaaacgatagaatattaataacttcaacatcattcacacctgatgaagattttataattttagttaaatgcttgaaattaatgaatgaaaaattgtcaggtacaaataatcgtataattatgattgtcacaggtaaaggtccattacaggaaactttccttaaatctattaattcatataactggacaaatatagtcattaaaaatgtttggttaccaatatctgaatatccgaatattttaaaaattgcagacttaggtatctcattacatgtatcatcatcagggttagatctaccaatgaaaattgttgatttatttggttctggtgttcctgttgtttctatgaattatccggtcatcaaagaattagttaacggataatgaaaatggtgtcatattaaaggataataaggactgagatcagtatgagtgatgatattttaggattgttatttaataaggaagaaaaggataaatatgttaagattaagaatggtgcagttgttagaaagtcaaagacgttgggatgatgaatggaatactaaactttcttcaatgttatcattgaataactctaataagatttgaatacattaaataactttgtttataagccagtatagagactgaaaagtagcataatacggagatcggagtttcctcgccgttatcataataataatttttttagaaccttatattattattattttttgatcccttttcatttatttttaattatccatttgcttcattctttcattgacaacgtgtagaatactattagatcacgtttaatttgctagaaaatttgcttaaaaaatataagagagttttaatattagaataaaacgtgaaaatgtcagcttattttcccaatacttattctgatctatcagcaagtattttatccgattctacaactaatgatttatatcagttaagaacatcagatttgaaaattattagtcctcgtaagaaaagtgttagattttatgatgatataaacggaactgttggtgaaactgtaaatagtgttaataattatgatgattcaaatagggaaagcacatcaaaaaaattctttaccaattcaagaaatattttctaaggaaaacaatttcaaagaagataaaaaggaagaaagtaatatggatctagttgatctagactcaactttgaaatactttcatttccatagtagaagttatgattctgaaacagatagtaatcaagaaaaaaggggacaaaatgtaaatgttgtagttggaaattcttatgatgtagacacaaactcaactaaggaaagttatcttgaaatcccaattggtcataaagttttaaatatacaaggtactcaaaaggcaaaaccaatacctaaacctgatcaagaagaagttgaaattaaggttgagacaaaccaagcgattagtcctaaggaggaacaagatgaatttgaaaatttatttatggaagatgcatcaagttcaaaatatagtacagaaacagatatcgatatagattctagttcaaataatgaacattatcaaaaaattaactgaagtgattggagatataaatgataaaagctcaattgaagatagaagtattcgagttcgattttccggaaatgatagtggaattgaaataagaaagcccgaactttcaatgaaaaatgtgaatgataatggaaaagaaattgaaatgaaactgatacaaataatgcaactgaaatagttggtacatcatcattttgatacaaattatgttcaagaggaaaacattataaggccatcatcaaaatctaataatgaatcaattaatcgtagtggttgggatttaaagcggaaattatcgttttcattgggtaaatctgcacttttaaaggaagttgaggattaaaagaggaaaataaatttttgattgaaaaagttgaacttcaagaaactcatatcaaagatttgaaactgcaaaaggatgaatattttgaaaatatgaatcttttagaagtgaatacaatacactaacctcagagaatagcaaccttttaagtctatataagaaatctgaacgtgaattatccaatgctaatttaaagttaataacattgcaacaaataaatgaaatggaaaaaagtcagcaattaattgaagatatcgaaagaaaaacttttattccatttgaaaataagactattaaatcatttcaaacaataattgaaactactaatgctaagaatcaatatttacaagaagtatttagatttttaagtaaaagggttaatgatatttatcaattcaccattgctccagcattatatttagcaagtgttgagattgaatcagttagtgatgatattagttttgattcacataattcaattcaagcatatattaattctaactttatcatatttaaggaagcatatgaatttgccaaattagataaaattgaaaatgttgaacaatataaattagactaccaatccaatctagaagatcttgaaaaatactttgataatcttaatgatctgatagccgggaagatggagggactcattcgtcaaaagatgcaactgtaagatataagatacttacgtaataatttgatgtaaatacttacgtaataaataaataaattaaaaaaaattttctatgactcaacaatctccggttccgctgttttcttttttcttttcttcggcgcgatttttcagcattgacatgacattttactctttgaaatttgatcaatagggtcaaattatttagaaagggaactttattctatatttattttagtttttcaatttatttgtagaatctttattagacaactcctctagttattgcttaataatggtacaagagggacaagtagaaaaagtcaccattcttggtaaagataccattcatgttggttacaagattcaaaatcatatttgtgatgaaattgttcgtacattgaaatcatcaacttatgttattgttacagatacaaatttagttaaatcaggtcatttagatagatataagactgcatttttagaaactattgctagattaagaccagaagctagacttttaacttatgttatctcacctggtgaagcaaataaaaatagaattaccaaggcagcagttgaagattatcttttatctgaaggttgtacaagagatacaatcattattgctatgggtggtggtattattggtgatatgattggttatgttgcagctactttcatgagaggtgttaaagttgttcaaattcccaactactttattagcaatggttgattcatcaattggtggtaaaactgcaatcgatactccattaggtaaaaattttgtcggtgcattttggcaaccacaatatgttttagttgatatctcattccttgaaactttacctgttagagaatttattaatggtatggcagaagttattaaaactgctgcaatttggaatgaagatgaatttgatagattagaagctcatactgaaattttcttaaatgttattaatgatagatcaaagggtgatgttgatttaactccaattcttgatcatatctataaattagttcttgaatcaattaaagttaaagctgaagttgtttcattagatgaaagagaaggtggtttaagaaatcttttaaattttggtcattcaattggtcatgcttacgaagctattttaactcctcaaatcttacatggtgaatgtgttgcaattggttctattaaggaagcagaattaagtagatatttaggtattttaccacctgttgcagtttcaagattaagaaaagttttcgaaggttatggtttaccagtctcaattcatgataaaatcgttcaaagtagagctaatggtaaagtttgtcctgttgatatcttattgaaaaagatggcgattgataaaaaaaatgatggttcaaagaaaaaagttgttttattgaaaaaaattggtgaatgttatgaaccttcagcatcttatgttaatgattctgatttaagagttattttaactgaagatgttagagttaaaccatttgaccttcaaaataaaaaagatgttgttgttactccaccaggttcaaaatctatctctaatagagctttaattttagctgctcttggtaaaggtcaatgtaaattaaagaatttacttcattctgatgatactcatcacatgcttactgcagtttcagccttaaagggtgctgaaattacttgggaagataatggtgaaaccgttgttttaaatggtaacggtggtaaattaattacaactgatgaagaaatttatttaggtaatgcaggtactgcttcaagattcttaaccactattgcatgtttagttaataaaaatggatcaattgatactattcaattaactggtaataaaagaatgcaagaaagacctaatggtccattaattgatgcgttaagaaagaatggttgtgaaattgaatgtcttaatagggaaggttcattaccaattaaagttaattgtggtaaaggtttgaaaggtggtagaattgaacttggtgcaactgtttcatcccaatatgtttcatctattttattagctgcaccttatgctcaaactcctgttactttatcattagttggtggtaaaccaatttctcaattatatattgatatgacaattagaatgatgtcatcatttggtattgaagttgttaaatcaatggatgaagagtatacttaccatattccattaggtcattatgttaatccaagtgaatatgttatcgaatcagatgcttcaagtgcaacttatccattagcatttgctgcaatgacaggtagtaaatgtacaattccaaatattggttcaagttcattacaaggtgatgctagatttgcagttgatgttttaaaaccaatgggttgtaaagttgaacaaactgcaacaagtacaactgttgaaggtccaccagttggtactttgaaaacctttaaaacatgttgatatggaaccaatgactgatgcattcttaactgcaactgttgttgcagcaattgctaatgatcctgaaaatccaacaactattacaggtattgctaatcaaagagttaaagaatgtaatagaattgaagcaatgagagttcaattagctaaatttggtgttattgcaactgaattagatgacggtattgtcattcatggtattgattataagaatctaaaagttccaaatgaacctggtatttattcatatgatgatcatcgtgttgctatgagtttttcattattagcaggtatggttcaatcaaatgaatcagttattgttcaagaaagatattgtacttctaaaacatggccaggatggtgggatgttttacatactgaattaggtgctcaattagatggttatgaaccatcatcatttgctgaatctaataaggtaactgcaaagaaaaatggtaacaaaagtataattttgattggtatgagagctgcaggtaaaagtacaatgtctaaaattatttcatctcataataaatttaaaattttagatgttgatcattattatgaacaaaaaattggtaaaactattaaaaaatttgttgaagaaaattcatgggaagaatttagaaaacaagaattggaaacatttaaagaagtcttaagtaagtttagtgaaggttatgttatttccactggtggtggtattgttgaaattcctcaagcaagagaattattagttgaatattatgaaaagcaaaatggtattgttctgcatttacatagagatattaatgaaacaatcaaatttttaaatgaaaaggatactgaaagacctgcatatgcagaagaaattttaagtgtttggaacagaagaaagatcattatatgaaaaatgttctaattattatttctacttaccacattgtggaaactgatgctcaattctcaagtttgaaaaagacaatgggatcatttgttgaagaaattattggtaatccaattgaaattccaaaatcaagatcatattttgtctgtttaacttacaaaaatttaaataatgcagaatcattaaagaatttaagaaagattaccgcaggttgtaacgcagttgaactaagagttgatttattagaatcttatgatattgattttgttgctgaacaagttggattattaagaactcattgtgatttaccaattattttcacaattagaactaaatcacaaggtggtgcattcaatgatgatgattatgaatcaattgaagcattaactatgttagcatttaagatgggtatttcatatgttgatatggaattatcattaccagaaggtttatttgcaactttattatcaaagaagagattcaccaaaattattggatcacatcatgatttttcaggtaactttaaatgggataattctgagtgggaaaacaaatatcaatttgcaaataattcaaatgttgatattattaaatttgttggtactgcaacagattttaatgataattatatgttagaaaatttcagaaattcacataagaacaaaccattaattgcaattaatatgactagattaggtcaattatcaagaattgttaatccattattaacaccagtcactcatccattgttaccaaattctgctgcacctggtcaattatcaattaaacaaattaatgaatcattagcaatgattggtgaattagaaccaaagaatttttatgttgttggtaaaccaattggccattcaagatcaccagttttacataataaaggttatgaagaatttggattaccttataaatttgataaatatgaaactgataatgcagaagaagttaatgaaaaaattgtcaaacaagataaatttggtggatgtgcaattacaattccattaaagattgaaatgatgaaatatgcaactgaattaagtgaatcagcaaaagttattggtgctattaatacattatatccaaataacaacggtggattaaatggtgataatactgattggattggtattactgaatcatttaataaaaatggtgttgtttcaggtgaaaatggtttaattattggtggtggtggaacttcaagagcagcagtttatgcattacattcaatgggatgtaagaatatttatatgttaaacagaactgtttctaaagttgaagaaattgcagcatcattcccagttgaatataatattacaattgttaataaaattgaagatattaagggtgagattcaattaattgtttccacaattccagctgatattgaattaactggatcatttgcagaaattattgaaaagtcattatctaaaattgataataataatggtggttatttattagaagctgcatataaaccattaattacaccaattatgaaattagctgaagaaaaatataattggaaagttattccaggtcgtgaaatgttagttaatcaaggtattgcacaatttgaaaaattttgtggtattaaaccattatatgatgatatctttaatgcagttgttgaaaactgatttctatattttataataaatctttaaataaacatgctttgtaaatacaaaaaataaaagtagatcacattttataattataatgaaataaaataatactaagcgagtccaaacactaacacgttaattgatggcactaagctttatcatttttacaaaacattaatgccaatataccatagaataaccccaacaacgtgtaacgaacctacattattagatgaataccaatcaaatactaaaccatcaatagacaaggataaagagaatgagatttatttacaatggatgccagatataaattcaataattgatccagataatgaaactaggggtaaattagcaagtaaatggtcagttaataaaaccaatatattatttcgagaatatcagagattagacaataagaataattggagaggtggtagtaatattaaaattgggttatctaaattagttaatatagttaatgaaagttatggaattgataattggatgagtaaagttgagagtagtagaataattaattataatgaagaaaaattagaagttaaaagtgttgttactgttatacttgcagataatacaattgtacaagaggaaggtattgggattggtatgaatttacccagggaaatgatgtttagaaaatgtaaaaaggagagtgttagtgatgcattaaggaaatgtattgtaagattagttgcattattattagattatgaggataaagtacgtagtgggtattatccaaagtatagatagaaagatttatacaattatgaaggatttgataaggatgaaatgaattgattgctgttaattatacccgttgttaaaataataatctttttaaatttagttaaaggattttttgctaaaatatatttaattgatgaaatttctgaccaagttataccaccaattgccattataattattgtacttttcgaaatttttgaaagttctgaaattttaggtggtataattgaattaaataattgctttttagattgtggaactaaaaatgattgagttgttgatgttgataatgatgataaatctaaattattccatccataaacaattgcacgatcagtatctggacttgaaataaatgatcttgtataaattgattgaataagtcttgttaaaattggtacgtaacctgtatatgtaaaatctgcgtcatcataatcagttatgttgttaatcgtagagggagaagaagattcttcatggattggtagaaggttaagagttgatgataatgtgttgaagtctgttattgattgtgaagatattgaagttgagtttgttgattgtgacagagggatgtgtgattgttgattattttttgataatgataaaaatgaaggtaaatttatacttgatgaattattgaaaactattatatttaatttttgtaaatttaaaagaattggtagaacttttgttgaattaaatttgaaaatcatatcattgtataagtaatttgcgaaatcatttgcattaataccatttttaacaattgataataatattaaaattttgaaaatatcgtataattgaacatcatcattatatgaacttataattaatgataaatctttaaggattgaaattgaatttaattcattatttagaatggaatgttgtaaatccattaatctagaataatatgatgttagaacatctgaatgagttgaaagggggatatcttctaataaaggtatattaagaggtttttgatattgaaatggggatttatttaatgatgataaaattaaatcagctattgaagtatgagttgaaatgagggatttagttgaattaagattagataaatcattaacgaataatttaatttcatcaatattatttaaattatcctttttatttaattgagattgtaaaagtttagcatttttatttaaaattggaccaacatgactaaaatttaaatcaccaattatatttgaaatttgattttcatttgaaaacaatgatgaaattgaagttgttttctgttgatttgaaattgattctgattctgtcgggagattaaatggttcaattggggataataaattgaaaaattcggatattataccagtataagatagttgagataaaacacaaggtaataaatcatttgatctatcaattgatattaaatgaactgaattattataaaaagaatttgtatctgcaaagatagtatcatcaatatcatcaataattttccttttagaatcaggtaatgaaagaatatgagaatttaataatcttgaataaattgaataaaattgatttgaaagagggcctttaaggaaagtatttgtaattcttaaattataattattttctatatttaaattaagtaaataatttgctaataattgtaaaggtattggagaattatttaaatataaatctttaaaagcaaatgataaatcaagtgaatgaattgataaattatttgaaattgaataagaaattgaaggtaattgagttgaccatatattaaatgaagctaattgagattctaaaccaatatttgaaatatatgaatgtaatgatatatctaataaaggatgataaactattaaatgaggtaatgttgataatttccaattatgaattaaattagataatagtaataattttgataaattttcatttgataataagtttatcagaaatacaatgggagtatctggggtatcagttggaggaggagtagttaatgatgataatgatgaattatttaatgaatctggtaaccaactagtttttttgattttagcagaatttatgaaagtagagaaagaatttttagttaaatggtttaaaatatgagaaagagatttatctaataccagtatagaaggtggtaaagagtcgaatattgatagtaaatcgtccattagataaggaagttgttattaaagtgttacttgctgtataaaagataaagatcaatattcatgtacccacaccagccgcaagtgaaatgaaaaaatgaaaaataaaaatgtggctagtgaagtattacataatcaaagccttacgtaatacaaaatggaaaaaaaatctttcattcacttaagcgttatagtaatagtaatagtaatagtaatagatttagataatattaatatattggaataaatataaatagagatagaaatgaatagtagtgtaaagtagttataataagactaagaattaagcagaatcttcaattttcttcttttcagcaagagaagcataataattttctctagttgcaataattttcttatgttgagaccaccaagcaacacccataacaccaccaattgcaaaaccaacggtgatgtcgataataatctttctcttcatagtaccagcaataggagcaatagccataattgatataagtttgtttgtctttgtatataaactaaaatgaaagtatacaatacaatactaaaccataatcatataatcatacaaatagtaaatcgcaccatagtaatagtaatagtaatagtaaacttaaataaaataactaaccgtacaccaattaccttttctcttcatccaatgaaaatctttcttttccatttctctctctttttctttactatgtatggtgcgacttacttattagtattagtattagtagtgtatagtaaagacttagacttagtatatctatctacaattcattattcacacaatgtttgctcaattatcaagatctattagacctgcaactaaatcatctgcaagaactttcacttcatcttcaaagaatttatcttctcatttccctgaaggtgcttataataacttaccttttaaagttaagaatagaagagttccttatgcaattcctcatattatcttttgggtccttggtgcaggtatcccattctttgcagtttgtgttcaacaaaagagagctggtttactttaattttagtcattaacaaattattaatttaatcatttattcatacttctatctactatattatattattatattatttacttttataaaattttacaattctaataaataaattttatcaaaattattagcaattattcaattcatcattatcatcatattatcattccatcatcttttattataattattcaaatttctactaattggaggtttaaacatcatttgtcgactctttattcgtttattattcatattcatattattactaccattgatactactactactactactactactacttttaatacccatcctactactactactactactattcaaactactactaatattacccatactactcataattctacctctatttccacctccatttccatttccatttccatttccaattttactactacttaaattacttctaataagactacttgtattaatatttgtactctcagcttgtatactcatattccttatatgattattattatcgttattccttatatgattattatcattattcctttgatcatctcttgtaacactattttccctacttttcatactaaatttctttaatttattaacaaattcaattccttttccattacttaaacttctctccttaatatccctatccttaatttctttctttaattcttctatctctttttgatatccactacatttatctaattcatttcgacttttacgtaataattccttcagtctattattcttttcccttaaatttttaacattattcttataataatcaattaatcccttcatttgttcaaattgaaatttatttccaaattgtaaattacttaatttctcataacttggttcaattatatcccttatattatcctctattaaatttaaatctttctcaatcttaattatactaactcccctatttttacatttattacaataatctctttcaacatgttcctcacaaattacatgtgcgcatgatgttaaatataatgtagtgtcccgtatattcttataacatataccacaatacagatattcctccattatttacaaagggagaagataaagtgatctacacaaaactgttataaaaatcgctgagccgttgaaattttaattttaattttcttccttctctaatcaatgtccagatctaagttttcatcaagtggtgtattatcattatgattatcattatcattggtactgacactaccactggtagttgtagcactggtagaattggtactattactaccagcactattactaacattaccactaaaaccatttataacctctctcgcaagattaccaactccattactcagatttgatgaaattgcttcaattgtactaggatttaaatttgtaccaaattgattattaataacattacttaattgtgatgttatagtattggctaattgatttgaaaaatcattagcattacgtgtatctgttgtaaatactgcagctgtagcagctggtgtaggtgtacctgttgattcagttgtttgtgtaggcactgatacaggtacattgttattatttctttcatttcttaattcttcacttctacgaagtgcagttgcaattgcttcattatgagcattacgatgaatatctgcaatatttgcagtagtattagcattggtattcgcagtagtatttgtattcgtattgtttgaatttgtatctgcatttctagtattattaataattgttggaatattggataaatttgcaaatcctgatgcatttaatgcttgactaattgcattaccaatatctacagctgcatttggtccacttatattaatattactattgttattagtaccattattattagtattagtattagcattagttctaccaactctaattgaacctgctaaaactgctggtgaaggacttaatgaattacccatttgagaaattgatacattaccaaatgaaattggtggtatacctgattcaatcatatgagttggtaaatttggatatgaattaataatttctctaatatttggtgtaattattgaattaataaaattttcagaatattcttgttgtttacatctttcttcacataatctaattgattcctttaattgtgctttaaatctatttaattgatttggtaatttttcattaattttaataattttaacatatgtctctaaagaatttggtgtatcaccttcatatagataaataaatgctaattgacataaacttggaatatattcatcatttaatttagtactaattaataaatcttcctttgcttcatccattgcattcattttaactaatgtaattgatctgttataatacaatgcaaaattatttggttctttatcaatagcttgtgtataacacattaatgcacctccataattttgatttctaaacttttcattacctaatttacgtaactcctccgttgtcttatcttgattactcatatctgtgtagttgttcctacaaatataataaaagaaagacactataactctctcattaaaaagaacatgtaattttcccatagtgaagaaatacctcgatttctaaaattttatattaacatgaattttacttattaatgactagtaatactttctttcttatacccaccatgtacgcttctaataggggcaatgatcccctggatattaatatattggataatttacaacctattcctcaattatccaaaacaatatgtattaaagattcgaaaagtttacaaacttttctaaaaatttcaagaaattcattagatgataatttaagatcaactatttatagtatgcttaatcataatgaacaaaatcatgaatcaatattaaaattaattaatactgatattaatagttcatcaaaatcagcttgtaattcacttttagagaaaattagtttatccagaatgggaaaagagaaatcatataatacaatattgtaaaaatcaagttgattcaatttcaattgatccaactgttgaaaaggattatattgaatttactaatctgtcagtagaggaaaaaaataatattttaagagttgatccttatgcttataaaaatattgaacaacgttataataatgcaaataatgaaataattgaattaaagaaactctattcaaatgaggaaacaattgaaaatattataactaatagatcaatgtgatttaatgaatgatttatgcaaaatcaatgcaaatgatattaaatcacaatttattaaatattctaaatcattatcacagtaatgataaattacatatataaagaaataccatttataaattaaatatcctgtatataaaaataatatctaatgaaatacattaatctatacactacaatcaaagatatcttctctatttaaccaccttatcataaagatcagatccttcatacgcgtcaacatgtaaattttcacaaaatggtaaaaatatatcaacatcaacatcaacaacactatattcatcaacaatcactgtctgtatgtacaaagattacgatatccaacgagtggataccatattagaacgtattttcgatgatttggactcttttaatgatttttttgaagaattggagggattggctatagaatatggacttacattatcacaattacaaaaaattataaatgaaatagttaatacaaattcaatacttaaaatcaatcataaatcaaaacttatctcaatcttatattgtaatgaattaattggttttgatacaattttgaaaattatatgttgctttaaaattccaacgtattataataaaaaattaaagataaaatatttacatcaaaatttacaaattaaattatcaaattttttagtaattaattttgcaaatattaaattagataaaagatatttacaaatactaagtttgatatttgatactttacatattggttatctacgatataatatgggattgtttctaatataccttcttaatttaacatttgaaatggatccttattatgataaaaattatttctttaattataagaaactcaatatggttttagaattttatgaatttaatcctaaaacttcattacatttattattatattttgcagatcatcttaaaaatgtccccaaaacagatcttttccatatgttatatttaaaatatacaatgattttagagaatgttaaaatacccaatagtacatttggtaaattacaatcaaaacatgtttatatcttgacaactatgagagaaggtagaatagaatcagaatttttgaaaaatatacagatttatatatcaattgtcaataatttaaatggaatgtcactaaaaatcaataataaatcgggtagaaagaggaagtttatagaggatgatgatataattggagatttccaaatacctcaaatatattcagaggaatgctttcagaatgaactttatttatcaatcaaaaggcctaatgatgcttttaaatctttattaatgttgagtaatttgaatattgatgatattaatgatattaatgttatagaagagttccaattcgatgttgaatattctaatatatcgttatattatttcactcttttacatattttaataattcaacgaaatatggaatcattgatttataatttaaagcatatactgaaactatcagaagatagtaagctattgacggttactaatgatattgcatggatattcaaaggaataggggtatttcaaacattcaatacagaagaatcacaatcttgggatattatagaagatattttcaaatctaagataatggtggaatttgcaggatctgatgttatgaaatataatattttaaatatcccatatttaatacaatttataaaaccccaatatgataaatatgaacaatttttgacatcaattgtaaaacataccatggaaaataacaataaagctatgattaatgggttggtttatcttgtaaataagtggaagaatagtcattatgattttaacaaattagttcaacttattttcaaattctttaaatcagaaaattgtaaaattttgaacgaactaatgaaaatatattcaatgatgaaagatattccatgtgaatcaattgaaatagagacacttataccaaaaccagattttgtgttgtacacgtattccaccaaaagtttgaatattttggacaaattaatgaaacatatcgtatattgcaaaagttattatacaaaatatggtaaccaacatttagaagatcctagaatgaaaatttttaaaaaaatgaataattcatacattatcgatctctgtaatttattctggaaagattcattaccagagacgacacaattattattaccatttgaattttggtcaaatttaaaagaagatggaaaatttaatattttaaacaacagttacacaagggaaaccccacctccgtcagaattggaaattgaacagaggaaattatatgtcctagagaagttaaaggaacaatcatatactggtatatttgatttcttagttggttcaataagaagtgttcaatcagcaatggaaagtgtgtgagtcatggtatccgtatttggtaactattcagatataggccatctcggatgttctcggagttttcatcgagtagtattatatcaaaatcagtacttgattcactgccatattttatgcattttgatatttgtacgatataatcaccttatagatcagtataagacataataatagatatagatgagccacatcgatgaaacaataaaagcaatcgatataagattaaagatacgataagactgtggatctattaatttttgtgcaaccgctccgtgaaatttttttttcacttttattaattatttattattagaaaaacttttcttttgagccttctggaataaagtgtctaagatgggatattcaggagacagtgaatcgcaagtggtgatggatacatacagagaagtttatgatgttgataatatgcatcatatagatcattataatgataataataataataataataatgataatgatgataatgatgataatgataaattagataatgattcaaaattttcagggagtggaaataattcaaataatggtacttatttgcctgattcaccaaaaagaactgtatcacttgatgaatttacaattgagactgatatagatgtagcatcattatcatctgtacaaagagtagaatttgaaggtgaaattatcatgttagagaatagaaatattttccaaaataataaaataaaattacaaatggtagctgcaatgatatcattattcctaattggattaactgatcaagtcattggttcattaatggaatatatcttgaatgaatataatattgatagagttcatatttcttatttattcgttgcacaattttgtggttatatacctgcaagtatgtttaataattactttatgggtaaatttggtttacatataatgtattcatcatcatgtttttttgttttaattccatcattcctgtttttcatcaaagcaccatattttttacttccaatttgttcaatttgtattggttggtcatttggtacaattgattgtgttttaaattcatttgttggttcattagattattcaaatgaattattaggtataatgcattcaatgtatggttttggatgtttagttacaccagttttatcaatttcattaattcaaaggggtatgttttggaatcaatattatttattattattaggcacagcttttgttaatttaattatggcatatgcattttttggtaatgaaactgctgcaaaatatagatatttagcatcatcatcacattccaatcttaactcagatgataataataatgataatgatgattttgattcaaatgaaagtttagaacctgttatgatggaaactatttgtaataaatatgttttcttttattcaattgcgttgtttacatatgtcggtagtgaattaagtgttggagtttggttaaataattatttatttagagttcaaaatgtttcagaacaaaatgcttcatatattacttcatcttattggttattcatgacattaggtagattctttatgggatttttcacaggtcgttattataaagataaagaaattcatgcacaggtagcttattgtttctttgtttctttgggatgtttaggattttggatatttgaatcatcagttagattacaagttatttgtatttgtattgccggttggtttgttggtccattatttggtacaacaattataattgctttaaaaacattacctaaaagattttcattaaatggtatttcattaattgcaggttttggaggtacaggtgcagcaattataccatcaattatgggttatgtttcagaaaattttggtaatcaaaataatgatggtacttcagatggtgcaggattaatatatttccctgatgttgttttcatatcattcacagtagctgcatttttatggttaggattttatttattaaataaacatacatttgattcaaagattagattaaaataaattttaatcttgtttaattccctccaagttagtatttttattgtttttttttataaattagttcattattatagaagtgttttttagtgttacaaaattagttggtcagtttctgtaattatacattgttggatccccattatgcctattttctgtgttatgattaggttcatatgatggagtgttattgtacatgatctgattattgttaggattattagtggtcatagtagtattattagtattagtaaaagtatcgttataattggtattaggattatagtaaggttcattttttgaatgtatccattgttgattagcctgtggtggtatattatttacattattttgagtaattccatgtatagcataatttgtatgaactaaatgatgtaaattttgagtttgattataataactattaaattttttcgtttcaaaattatttttatcctctaataaactacatttaacacttgtttcattattataatatggtgataaagaattttgtttaatattagatgaattagaatttgagttagagttggaattagaattaattattgattgatttttaaattgtttatgatgccaagaatcattatatgcataaacatgtggataattatcaatattagcattgtaatcattattttcaaattcttgatcattaaaattatttgaagtattataatcattctttggtttaccacccattatttgatagctatttgcataaaaaatattttcagcccttgtatcattttcattaatttttttaaatctataattaacattctcatcattattattactaagatatggtgaatttgtactaattggatgagtattgtgattatttggaatgttaggattagtatttgtactcatattaatgtgttcatgattgaacatattttcacttggtgttgtattatcaaatgatgaatctgattgttcaagattaaattttggttgccaattagttttcatcatccataaacttattggtatattagcatcaggtacaactggattattactatctaaattaatatctggtgtatttgaaaaatttaaatttttgaattctaagaatgattcattaatgttactattatcatgtgatgaagaatttgaaatattattattttgattcatttcaattgattgatgattatttaaaatattcttatcatttgatgaaattggaggtttaagaaaactaccatcattattttcctttttattatttatattatttaatgaattattttctaaacttataggttttggattaccaattgattccaaatctaattttggtaataagttatcaccattagtgaaaacactttcagtaaataatttatcaaaatcaacacctaaatgttcaaaatttgtaaaatttgtattaaattttaaattttttatttctaattcacctgttgctaataatgataaatcaggtaaattaatttttttcttttcttctaatttgtcttcatttgttgaattttcagattctcctgaataattattaatattatttctagtattaagttcatctttattatcaagggtattatcattgtcattgtcgttttcattttcattttcggttttgatattattttcattcttaatttcaactccattctcattttcaatctttattttatggtggtttgatttacttttattccttccttttggattaaatgaagatttattttcattaggtacaacagatttaacaatttgttttaaataatcttctgaatcataaattgttgcaaatatacataacattggataacaatttggaaattttgtataagattgtctccaaatacccataattcttaaaaatgaatcttttgcaattttagaaattttaggatcttcattaattaaatgataactcataattaaagcagaagttgttaaactattatgagaaacaaatgcaactttacttattaaatttttagcaactaaacaatcactcatcattttaattatttgtacagcttgaaatgagattgcccaagatggataaatatccgttgcatgtcttaaaatatttgccttatgaataacaattaataaagtataatattgagataaaatcattaatgaaaggaatgaatgagttgatttatcattaaatttaaattttaattcttttggtatattatttaaatatttaatcataattaaatcacattttttaattaaatttagagttggtttaccatctaaatataatttagtaatttcttgttgaattgaaccaattttatcaattaatttaccaaatttaactaaattaattaaataaagagattctaatggagtcataccagtatctgataaatcagataaattaatcattgagtgatcagattgatttaaatttataattgaaggtcttgaataaccaaaacaagttaatctatctttaaaatataaaatccaccataatcttttcctaatttttttttcatattgatttaaatccgatgaaggttttaaatgaataccatattgataacaaatattaattgctgcatgacaccaataataactatttttagcaatatttgacatattaccattattaaatgagaaacaaagtaatgattgaattaatgcaattggttcagtttcaattgaatattgataaattaaagttgcacgtttaaataaaatttgagaaatttctacattttcaacttgctttgttggatcatttgattcatgccaagaaccaacatataagattgagaataataataaaagagatggaggattttgtaaatttgtataattttgataaaaattagttttatcaataattggtaattgaggattaataaattcaaagaaattatcaatatatttccaacaagttgattcatcaggaattgagaagcaaccaaaagattgtaaaacttctaaatcaagagaatctaatgaataagaacgtttatgatcttcagttattttatttaaagctttattgaagatttttttcattaaattatttgattcaccactaataccaaattctgttatcattaaatcacgtaaattttccttcaaaattaaatttggatctaatgaaattgcacttaaatgaggatatttattatgttttgaatgatttaggaaagaagttgggaattttggtattgaagaagttgatttaacatcagtatgagaatctagagaactaaaatttgaattaagtatactatgtttccgattcggtatatgattagaatttgaagaaggtgaactatttgatgtattatttgatgtattattgattttatcagtagcagtatcagtagcagtattattattattattattattattattatcagataaatgtcttttcttattatttgggaaagaattgaaatttttattatcaacaattgaatttgaattttttgatcttgccctcttctttctaacatagagacgacattctaaatttgaagattgacaattttgacattttgtatttgaaggtactttatctaaattacatttaatttttttattatgacaagagatacaggctttacttgatctctctcttttactgggtacagtagatgaattaggtttcccaattttaattgattgagacatttgataatgatatactatattaattgaataacttactcttctttgattgatgaaaagggggtattatgtccgtagtattttaaatattatttccgtattaaattttattttttccatttccattttcattttccctttatttccttttatctatgacagttttctttgttgtggtgttgattaggtaatcatttattgattatgtaatcattttattaaatttgagaagtcaattctttatttggagaagtcaaattttcttgtttagaagtcaagaaaagaagtcacagaacatagaagtcaaataactcctctataagataaaaagcagtggccttaaggtatttaaacaaggtatattatctacaatctatttcaatagaataaaagaaaggtttatgatattggtattcaattggtatattactataagtaagagttaatatccttataactatcctttttcaaatttattataatacttcttttctaagatcttatcttatctaatcttatctcatcatacaatgttaaaattatcttctaaattatcctctaatactatcagtaataactctcaattacttaaaaattcaattaatatagtatcaaagaaatcatcttattcaaccaatgataatagtgaaaatcttttgaaaactcctttatatgatattcatgttaaattaggtgcaacaatggttccatttgctggttattcaatgcctgttctttataaagatcaatctcatattcaatctcataattggactagatcaaattgtggtattttcgatgtttctcatatgttacaacataaaatatcgggtccaaatacaactaattttttacaaaaaattgtaccaactgatttaaattctttaaaacctttccaaaatcatttatctgtacttttaaataataatggtggtataattgatgatacaattataacaaaacatgatgatgattcttattatattgttacaaatgctggttgtagagaaaaagatattaaatttattaaagatgaattgaaaaatttcccaaataatgataaaataattcatgaaaattttgaaggtactttattagcaattcaaggtccaaaatctcaagaaattttatcaaaatttacaaattcaaatttaaatgatttatattttggtaattcaagatttattgatttaaaaggtttctcatcatcatctgataaatttcatatctcaagaggtggttatactggtgaagatggttttgaaatttcaattccaaatgatcaaattggtagagattttttcaatgctttattagaatatgatcaaattgttaaaccaattggtttagctgcaagagattctcttagattagaggcaggtatgtgtttatatggtcatgaattaaatgaagatataactccaattgaagcttcccttaattggttagtatcaaaatcaagaagagatggtgaatttgcaaattttaatggttcatctaaaattttaaatcaaattaatgataataaatcagttaaatttaaaagagttggtattgtatcaaaaggtccttccccaagacatggtaataaaatttttgcatttgatgatccatcaaaggaaattggtattgtttgttcaggttcaccttctccaagttgtggcggtaatgttgctcaagttttccttaataaaccttttaataaaattggtacaaaggttaaagttgaaattagaggtaaattaagagatgctcaagttgcaaaaatgccattctatcaaccttcttattataaaggtgaatgaatttattaacaaaaatgtgtatgtcatgtaattctactcctatactaaactaacacgaaacgaatgaaaatagatacgcgtaattgaaaatttcataattttcatttttatttacaatttgccatctctgtaaaatgctcagctcttttcacaacatcattcttcttttaaatctgttcttattcacacattaaacactttttaacactccataaataccctcaataatgtatattaaacgtgttattataagaggttttaaaacttacaaaaatgaaactataatagaagatttatcacctcataataatattgtagttggtagaaatggttcaggtaaatcaaatttctttgcagcaattagatttgtacttagtgatgcttataataatatgacacgtgaggaacgtcaatcacttattcatgaaagttctgtaaatataatgtcagcatttgttgaaattattttcgataataaagatcgtagaattccaattgctaaggatgaaatttcaattagacgtacaattggtatgaaaaaggatgattattcattagattataaaagtacaactaaatctgaaattatgaatttattagaagcttcaggtttctcaaaatcaaatccttattatatcgtacctcaaggtaaagttactgctctaactaatgcaaaagatagtgaaagattagaattattaaaagatattgcaggtgcaagagttttcgaaaataaattaaaagattctttaaaggaaatgtcaattacatctcaaaagcaattacaaattaaggatatgcttttagatattgagaaaagattagatgaattaaatattgaaaaggaagatttaaaatcttttgaaaaattaaatagtaaaaagaaaattttagaatttaatatttatgatagagaattaaaagctttaagtgatcaaattgatttaattgaagataagtataataataccacaaatgagactgaatcattaattaatcaattagaaaatagagaatcggaaatttcaaattgtgaaaatattttaaatgatttaaattcaaaggaaaaattaattaaaattgatttatcaattaataataaagagaatagagaaattttacaacaaatttcaaatttaaatgttcaaataaaggaagctaaaattaatgttgaatcatctcattcaattgaatcttataattataaaataaagaaaattaatgaagaaattcaagaaaagaaaaatcaaattattaatttaaaggaaaatttgaaaaaaactaaattaaatgaaaatgaaattaagattaaaatttcagattatcgtcaaaagcaaacttctataattgcaagacaaaatcaaaaatctaaatattcttcaaaatctgaaagagataaacatattaaaaatgagattaatttattaaatgattctacaaataagaaaaataatacattgaaggaatgtgaaattgaaaaaagtgaaatccagaaaaatcttgaatctttaaatattgaaaaatcatcattaaataataataatgaattagataatagaataaatcaattgaatgatcaaatttccattttaaaatcagaggcaagaactttagttgatgatcgtagtgttttatggagacaagaaagtaaacttaatagtattataacatcaaaggaagaaagtttatcatcaattgaacaaccatttaaaaataatattgataatggtaatgtatcattaaatgcattggatattgttaaagatattgcccataatttaggtccaaatattgaaaatggtatttatggttatttaggtgaattaattgatgtttctgaaaaatataaaattgcagctgatgtaattggtggtaattcattatttcatattgttgttaataatgatcaaactgcaagtattttaattgaagaattgaaaaaagttaaatactgtagaacaacttttataccactgaatagattaaagaatgaagatttccaatttcctcaaaataatgaatcagttccattaattaaaaaaattgcattcgataaatttttagaacctgcagttaaacaaatttttggtagaactgttgtttgtgttaatattgaaaaaggttatgaattagcaaataaattccatgttaattcagttactttagatggtgatagatgtgataataatggtgttttaacaggtggttttagagataataaaattagtaagattgattatctgaaaaatttaagaaatgttaaaagtgaaatttataaattaaaagaggaattaaatgaaattaaaaatgaaattaatttaaaggattttaatattaatacaaatttccaaaatagtcaaaaattgaaaaatgaattaaatggcttattaaatgataaaaatgaaattattgttaaaatatctaaatttgataatcaaatatctaagtataataatgatttaacaaatattgattcaaagatagattcaattaataattcaattgaattaattgataacaaaattgaaaattatcaagatgaacttaattcatcattttcacaaactacgatatcaccagatgatgaaaaacttttaagagagatacatacacaattacccaaaatagagaaatcacatcaagaaacattgaaggaaattgatgaatatgaaataaaaatatcgtcatatttaactgaaatttcagaagttttatcacctcgtttaaatcaattaaaatcagaacttgaaacaatggatgatattcaaaaagattcttcatatattttagaagatttagagagcactgttgaaaaattacatgaaagatccaaggaattaacagaatttgaaaatgatttgaataatcaattaaatgaaattaaagaaaatattgaacttaataatacacgaatacaagaattgactgaagctcaagaacaatttattaaagaatttgaagatgttggtaaaaatactgataaaaatctcgttcaaagattaagattgaaaaatagaaaacatgaattagagagaaatattggtgaattaggtgttttaccagaggatacattaacagcatatgctgataaatcaacatcatatctatctgataaattaactaaagtaaatgaaaatttgaaaaaatatagtcatgttaataagaaagcattagaacaatttgctaaatttgctaaacaaagagattcattatctgaaagacttggagaattagatgaagctaaattatcaattgaacatttaatcaaagttttacaaaatcgtaaaaatgaagcaattattagatctttcaaggaattatctactggattctctaaaatttttgaaaaattagttcctgctggtaaaggtaaacttattatacttaagaaaaatcaagagaaaaaaaataatactatatcattatcacaatatcctgatacaaatgaaggaatggattcagaaaatgatgaatcagaagatgatgaaaactcaattgattcatttgttggtatttcaattagtgtttcatttaattctaagaaaaatgaacaacaaagattagaacaattatcaggtggtcaaaaatctttatgtgcattatcattaattttggcaattcaaagttgtgatcctgcaccattttatttatttgatgaaattgattcaaatttagatgcacaatatagaactgctgttgctaatttaattaaatctttatctaaagatgcacaatttatttgtacaacttttagatcagaaatgttgaaagttagtgatagattttatggtgttatgtttaataataaagtcagtacaataagtaatattgatgcagagagagcattagatttcgttgaagatcaacatagagcttgaccttttttttaatttgtatagctgatattattgtctaataatcaaagtaaaattagtataaattacataaaattatacatgatgtgttgttgggaattcaatacaataatgataatacaaagtctaatataaatggttagtttggaatctatttcttagaatctttcatgagagcactaaaagctttattcttcttacccttgctctttgaacttttagaactgataaattttcctgcactcttggcattgataaatttagcatttccactatctgaatctgaacctgaatctgaatctgaatctgaatctgaatctgatgaatcactacctgatgaagaatctgatgattctgatgattcagaatcaattacttcaggtttctttggttgtgttttctttaatcttgtctctggtaattttttatcaaaaatagttgaaagtgatggcaaactcgaaagtcttgattgtgatcctgttgtaggtacatttacaggttcctttgctttatttgcagtttcagttggtttagcagttttgttattagcaacgggcgcagattccttgtcagttgtcgttggcttacttgttgcttttgcagcaggtttgacagatggtttaggtttcctggttgtggttggagcggtgacaacagcaggtttagcgcttgcatcgtcagaatcagaatcactgtctacatcagttgctgaatcttcatcagaaagagcaacaacttcttttgctgtattttttgaacgagttgttacttttggagtttccttactttgagatgatacagaagaagtttgtgaaccaccgactgtaattttttgaatctttacaggtttagtaggatgtggatgaatttcttcatctggagttgcatcagtggttagttttctaattgcagtaacatcagcatcttcatcatctgatctaactgatgttggacctttatttctatttgtaactgtatttgattccttagttgtaacaactttttttgtcttctttgatggagtttcagtagcttcctttatttcattagcagatctttttttattatcaggtgtagatttgacagtttcattagtttttgattgtgatgatgttgcagcttttgccattaaattgtttgtaattctttcgatttgtgccttagctttttgttcagcaagttcttttaatgcatccttatctaaaggtttggaagcatcggttggcttttctattgttttcttacttgtgtccttgttttcaacgggcttttcagtagattttttagatttatcattggtggctttatcatcagatttggcgttagttgcttttttagtagcattttcgactggttttgcaatactatcttcctttgttgagtctaccgcttttaatgccttttctgcattttctttagcaagctcagcagtctttaaagctttttcttggagtaacttagctgccttttcttccttttccttagctaacttagcagctttctcttctttctctttggctaacttagctgctttttcttccttatcctttgcaagtttagcagctttttcttctttttcctttgcaagtttagcagctttttcttctttttcctttgcaagtttagctgccttttcctctttttctttagctaatttggcagcttttgcagctctttcctctttttctttagcaagtttagctgccttttcttctttctctttagctaatttaagagctttctcttccttctcttttgctaatttagcggcttttcttcttttccttgctacttaagagctttttcttctttttcatttgctaacttaagagctttttcttctttttccttagcaagttgtacagctcttgcagccttttcttccttttctttggctagtttagcagctttttcttctttttccttttctgaaagagcagggggttgggattctgattccttttccttctctgactgtttcttctttggtgttgctattttagcagcttttttattaggagtactattatctaaattattctttttcgcttgttctttgtctgatggatttggaactgaagacattgatggaagaggggtttttttattttctgaagttttcataacaagtactgaagtatttggggtttcaacatcatccataacaggtaaatctttattagtatctaaattttttaaaatatcatttgattttttattagttgattttttagatgatttactttttggagaatcagatttagttggaacactacctctttcattttcattttcgtaatacattgaaccattaatatcttcctcataatcaacttttgataaatttggttgagaattaacagttaacataccagatgtaattctagttggtgatccagttgctaaaattggagaagctaatttcaaattacccttttttgctggatgaataactgtatcatcaacatcaggaattgctaatgaaatatttggattttcagacggttgtgtcataccaattggtttattcattaattgtttattacgatgacgattattagttgaatttccaacattatcattataattgttattattatcatcaaatgcccaaatggaagtattaattattgaatcatcatgatttattgtagttttagatgaattatttcttctctttttcataactttattcaaatcaccagttaaatgacgtttaccattaattaacattgaagtatcatcatcattaaattcatttgcaacaataacacgacaaatattacttgtatcgaaaaccattgaaactgtataatcaggatctaaatcacattcttcaatattttgaattttcaaaatttgtaaaggttcaccatcaggatataatttcaggaatctttgattaatttcttgagcaacaatggataatggattattagctgaagtaatatgtaaaaatttcttaattctcttattattaccattagtgttattattataattaataaatggatgagagaaattattcgaatattgaggtctatttaaatacattggagtactcattacattcattgcataagaagtattatgatcaaatagaggagctgattgttgattatatctatgatcattattttcatctaatttatcagttgttagtgataatacgggatttggagttccaatagatgaagacaaattcaaatcagaatgatgccaaactctgagggataattacaacctgtagtttaaacattgttatcctctatcaatagttatctatatgcttataatatacaatttacgaaaagaaagatgagcatccaaaacatgttaaaatggtattacaaccaaatccatcttcattaacagcgaagttgacttttttttccattattatagtgacaagtcagttctttcataatatctttctttcaatctttaccatatttcaatctctactggttcatctataccgttgttgaactcgatgggatgagtgggtagtagttttgtagtgtcatctccccaaacagaaattatcccgtcttttcctccactaaaatatcttggttcctgtacactacctgcaattacactgaatgcacgtcgactatcaggagaattggatattttggtagtatcatttaatgttgatgattccgtatatattgatctattttgtttattaagtcttgcaaccaatgagccatctttaactctataaactagaatttctccactatcagagggtacccaaagaaatgatatttcagtctgtaatgatggactaagacacatttcaatatgttgtttggtcttattacgtataagtggtaccaaaatttatacctttattaattggttttttatctgatgtcatatcccatactcttatcttttcatcattactaattgtaattaattccgtaccattttcattgaaaatcattgaattaatattggcatgatgtgctttatttggtagatatttcctttttttcaattgatttaattcaatactatttgaagttctatttgaatcgaattcaaataagtatttatcagaacttctaatatcccaaccgaaacatgaaccatcattaccacctccaatacaaagattttcattaaatgaagaccaagcacaacttgacatgaaaacctacaccacctttaattttcccaccaccacctaaattttgagtatccgataatgtacgtaaatctaacattttcaaaccaccaacaccaccatcattacaagatataacagttgatgaattacccattggattaaaatcaaaatccaatattcttgaatctaatgaaaatgaatgtacaatttgcattgaatctgtatcatataaattaatattaaaatcaaatgaagatgataaccacataccattatctggccaccatttaaccttagtgacaccaaatttatgaacacttttctgtggtaatacacaaataggtgaatatttcaatctaggtttataatctatctcatgtattctatcatcatccttgaataaacttgaatcatttaaatcccataatttaattgatgaatctgcagatcctgataataggaatctatgttgtaacgggtctagtgataatgaattgacagatgcagtaatgagaggggaaagtgaaagtagcaatatcagctctatcagtcgagacagttgagaactggaataccttgtctcctaaataaacctgcaatcgttcaatcattcattgtcagtattaagaagcagtagtaataccttagaaagagaacaacacccatgacaaagtaaatgttgtgtttcctcacatgagaaattttccagactctctctctgatcacagctgttgtgttgatgacattaaggattcattatatacattggaataaatcttcttttgtttatttggatggatcaattgagcttgatataatggattttgaagatagtcagagtgagagttcaagttttgatatttatagacataaaatagaggttcaatatcgtttattcttagattatgttacacctcatattattccaagatggattgcagcttatttattaatgttaatctttatgggacgtattgtttgggctgaaggttggtatatagtttgttatacatgggcaattttcttattaaatatgttccttaaatttttaacaccaaaatttgatccttcaattgaacaagatattgaaaatgataatattgaatcaggtgttggtaaaatggatgaaaatgatgaagaatttaaaccttttattagaagattacctgaatttaaattttggatgaaaactgttagttcaacttcaattgcaattttatgttctttcttctcagtttttgatataccagtattttggccaattttagttgcttatttcattattttattccttttaacaatgagaagacaaattcaacatatgcttaaatataaatatatcccattcgattttggtaaaatgaaatatggttcaaaatgagtataatatgtgatactttcattatatagtatagattttgtatattttttttaaaactttaacttaaacttaaaaatatttatgattaaacaaagactttgtatagtaatatacttagtgtaatacccaatactctaccttgattagtcattgttaaataaatccctgtacccattaaccatgttgtaatattcgatatcactattattctactatttttctttaacaataatctattctgtatggataagttattcaaattaatatcaggtgttgaattgggtatttcaatttttaaataaacgggtatatgatcagatattttacattcttcaattgaatcatattcaataactttatattttgatttattattatttaattcatctgaatgttcaagatataatattcgatcacaatatgatggtattctatttgatttaaaacttccactccctggtactctcttatatgttggtttgaaatcaatgtttgcttcatcaaatcctataagtatagttgaatctttccttaataagtttaactcatcacttttaagtaattcattatcaccttccccctcatcgcaatcaattaatccatgtgcatttgttgctctgtaatttaaatcaccgaatataaaacaatgagaattaggtttaagtacactccaaccatcttcaaatgataaattattaattatatcaaataaatcactattccttcttaaaatatgtgataatttttcacctgcatttaaatgcatactaacaaatgtgaattcaatattattaaattgaattctaataccaattccacctttcaatgtagtatagagatgaccaactggatatcctatagaattataaatttgatttattttatcatagaatggggttataattatcaatccaattgcacctatattaacaacgggtacatttttaaaattcaaattatcgtacttttcattcaatattgatatcaatccttcagataaggtttgtagtagtttcttaatggttgtgttacttgtactttttaaaattgatgaaatttcttgaaatccaaaaacgtaaagatctgagatattttctggtagtttactctcaattgcattataaaagtgttcattaattggaggtgtcttggcacaattgaacgtaagtatgaataaactactcattgttatttaataacccaataaaagaaagtttaaggctcagttcaatagaataatattatctgatttcccgtccctcatatttcttctttttctttaaaatttgatttcttgttaattttattatatacacagaggaaatagagtgaaaaactaagacaatgaagaaaggaaatgaaaatatcaaatagaagaaaaagttaattaacattagataaaattaaaataaaaatttgttaaataaagaagtatttataaaatagaaaaaaattattgtttgtcaaattaaatagttgattaaattgaaacgattaagtattagattaaattgataatagcattgaaatataaacagaaataaattatgatttaggatgttgatgatggattaaactcttgtttgagaactttgattacttgaaacgagatcagcttctttagcttcaggataatcactatttgcagtctttgaagcagataatataatttctctattatctttcttaaaattatctggtctgtaaaatcttaaatcgattctaccgactaaataaagaatattacaaattgtttctaatgcaccccataagacatacataacaactggatcataaatccaactttgagaagcaaaagtatcatcaataaagcaagcaatacatctaaataatgcaccaataaagacgaaaactgatgtaattgtaataattgtaactgaaatattatgttttaaagagaatttttgttcaccagcttgttcaaattcgtttaattctgcaacttcatcattttcatttaattcacttaaatctaaaccaccaccaacaattgttctctttggttctcttgcatcattttgatatctttgaacgaaaatatcttcaccttcagattgagcgtttttaactgggaaataaaatggggagaatgatttaatccagaatggttgataaactaaagcatctttatcactttgagatgttggaacaatataagtcatgataacaaaagcaatggagagtaatgaataaagtgtaataaggattgaagtaactttaacaacattacgacacatatcataatgagaacgtgaaaggaagtataagtaaggaacaacacctgcaacaattgtcataataacaactgcaataacaactgaataaatagcaagcatagcataccaaaagatttttgtattaccgaaaacaggatgtttccaagtgaaaattctttgagctaaaactaaattaaaggaagctaaaaagacaattggtaaaacaagtaaaacttcagaagcaataccaacatgaagtttcaggatattctttgcccaaacaattcttaatgcaaaaccaatccatctcatagttgcataaaagcaaaaacctaatgatagccaaaatctatgacctctcatataattaattgtgaatagagaaccatgagcaatagcaataattacgaaaattgctaaaaataatccacttggagcaatatctttatgatctggataagaaccaaattgagattgttgttgatcttgaacgtaatcaactaaaaattgaggaatttgactagtactattgtatatgtaaaaagtctttagtgatttcaagtaatttaacaataccagtaccatcagcggcaccaccagtttgagaacgaatcagttcagcaattgcactactcattttgaatgatttctttttatttgttaagtgaaataattattataatatgattatattaaaaaattggaaagtaaaatcttctttatagaatggaaaatttaaatttaaatttatttggaaaatggaaatggaaaatgtgtcaaacccgaaagaatttttttacacggctttaaaaattaggtttattcgttgaatatatttatatttccttcgttaaggtatgttatggatatatactcttgtagtgtaatagtagttagaataagagtaataagtgtgagtgtaattgattttataatatagtattatattgacttttagagatgataatagtaaaacgttatagtaagtaatgataataataataatactcaacaataaaatttatttttgttgggtattaaaaaataatcttaataaaaagattcgaatctgtataaaattattatgtgggaatcatcttcttttatacctgataaaattgcaaatactacaacaggatcttaataacagttattgtgggggagtgcccatatattagtagatgatgacaattgtagtaaatatgcattatcatacataaaatgatggtgatattgagtggggaatgtggaatgtggaatataggcatataaagagggatatatgcgcttatattattagtgtttccatatttctctctttttatttgccttcatttattttgctttattctttcttttatacaacaacgtatctttgctgtaataaattataataactaatactatgacagttgaaattgaaattaatccaaattctaataccaattctaatcctttttgtaaagattttgatcatatagttttctatgtcacttccccaaaattggtagcaaattattttgtaaaattattcggttttaaacattatgcttataaaggtttagaaactggttcaagagatatttcttcaactgtcattaaaaataataatgtaatctttgttttaactggtgtaattagacctttacataaagaaccaagaaatagattaattgatagtattcatcatcatattgcagctcatggtgatggtgttaaagatgttgcatttaaatctgataaccttgattcaattgtagataatttaatttctaaaaattcaactcatttacttattaatgaagttaatgatttattaagttatagtaaaattactgaagtaaatgataaatttggtactttaaaatatattacaattaatggtataaatgatacaattcatacaattattgatagatcaaattataaaggatttttaccaggttatgaattaattgatgatgaatttcaattaaaacctttaattgaattaggatcaattgatcattgtgttcaaaatcaagattgggatcaaatgatttcaacttgtcaattttataaagattattttaatttccataaattttggtcagttgatgaaaatcaagttttcactgaatattctgcacttcattcaactgttatggcttctgaaaatgaaattgttaaaatgccagttaatgaacctgcaattggtttaaaaaaatctcaaattgaagaatttattgaatttaataatggtccaggtattcaacatattgcaattaaagttgataatataattgattcaattaaaaaaatgaaagattctggtgttgaatttattaatgtacctgattcttattatgaaaatattgaaaaaaaattaaaattagagaaacatccaaaaattaaggaaagtttaaaatctattaaaaaattaggtattttaatagattttgatgaaaatggttatttattacaattatttacaaaaccaatttttgaaagaccaactttctttttcgaaattattcaaagatcaaatcataatggttttggtgcaggtaattttaaaggattatttgaagttttggagaaagatcaagaaatgagaggtaatttaactgatcaagatattgaacataaattagaaaaacttgtaattgaagaaacagaaactccgaaaaagaaagttaaacctgttattaaagaagagataactgatgatgatattgctgatgcaattaacttatttagcatagtgaaccagtactatacaattaacattacataaacaatatttactattattacataacataataaatagcattaacacacaataactacatacataatgaaaaacagattacttttttttataacatttaggcggcttagcaatttaagcaaaatccagtctttaaatttcctcacactattaaatcaaatcagtcattctaacttgattctaacacttcccttttctttttgttctgtgcactaaagacaatgagtaatcgtcctaatagaaacaactctaataacactacattaaagttaataactgcatcaattgcaattgcaggtgcagcttatggaacatataaatatttatcatcatttacacctcaaattataaatcagaatagaaatgaggattcgaattattggtgaaactgatagtaatccacttaaatttaaacaaaaggaagatacaagtatttcattagttatatctaaaacagttttagataaaattagtgaatataatgagaatcatgaagatggaattgatattcaaaattatttgaagaattataaaaatttagtaattatattataccctggtttaacatttaaagatctggaaaattattttgaaattgatgaaattaatcaaagaaggatattacaaacaagtgttgaagatagtattttccatttattgaaacaactaggtagttcaattaatttagtttgttttaaagatttcaataaaaataaagaggatattgataaagaatttagattagaaaatgttttaagtaatgttatctcattagataatttacaattcgttacatttatataatataatatattttatatatatattggattatttacttacttatgtactatatcacgacgactaccgaatacaactccttccttagtttgattacttccattcatataaccatattcaatggaactccaaggaacaccaccttgacctaacattagatgttttggtttatttggaattttaggtctttcatgttttttagaaatatttggtccaataaaattatatttattagggaaatttttattaacaattcttgaaaatgattgaattgacattaaaacttgataaggatcatttctttcaaataaatcaattgtttgaaataattcatcttgtgaaactcccttaattttacaaaatgttaaaaatttttcaatattctccatttgaacaaatgctaatttacttgatttatattttatactatcattctccaaatattgtgtttactaataaacatagtatcgtaccatcttttaaactatcgagtaaatcagtatttaaaaatacttgattatctattttatcacctagtactgaaagtatccaatttttaacatctttctgcaattgaggattgttgtatttagcaaacctagaattcttaagatcttgatcaagattagtttgtgcttcttgttcgttcattatgtatattatgttattctgttgtaaaataaaaagacaattagtgattaaaaaaatggtgtagtaaaaacacaaaaactgtacagacttcagccaccatatagtcaatacgtacttatcaaatacagttttctatgaagattaggaaattgttatggtgaaaaagtcgcacgtacaacccgtgaaaacttcttgtgaaaactcggtaaaaaataagatgaaatactctttgtatggggaaatgatttgggcagaacagttgggaataacactttcccttataactctagaataaacaggtgtttttagtttataagtatatgctattaaagcaaagacttcaaagtactatatttcttcttttttagaggacaatggagcttgtgcactaataaaattagaaaaatcatttaaagattgtcacaaaagcagaataatcgtaagtgatgtaattaagtattaagtattaagtattataaatggggagtaacattaagtatctaagataaactattttttggtggaattaataatgtgtctgatacctctgaaaagaagtgaatacctagctagtacatctaaattactggtttggtttccattatcagcattagcttttgtatcgacactagtatttgaatcaacattgctttccaacgtttctttcaacattgctttctttattaacattatcatttctttcgatatcatttccttcaatatcattaatcttctttttaccaagtaaaattgatggtggaataattgaaataactaaacaaactaatgcaatcatcataccatctaataaattataataaatttcctttgttgcaagtactgataataaaccttcagacatttcaattaatctataaattgatctaataaacataaatgcaatagcaaatgaaaatgtaataaataaataataaattgatctcttacttgtaatatgttgataatttttatcaaatttttcattattaaattgatgtttagattgtctaactttataaatgaaaacataccaaagaatttggaaacatgttaatgttaaaacttgaaatgctaaacctgcaacaattaaatctaatccaacatttgtaccaacttttaaagaatcataatttgtaattaaacctgatccaacaccttgtaaaatacctgctgtgacatttgctatttttaaaataagtaaaattaaactaatatttaaataaatgaaatcagaaccgaaaactttgaaaacttcacctgaaatataatataaacctgcaaggaaaaaacttggtgctaatgatgtacaaactgatgaaaaaatatgtgcactaacattaaaatcattctttgtaatccaaattctacctgcaaatcctaaaatttgacaaattaatccaaaagaccaataaataaagaatcttctttggaaatatcttaaagagatcaataaatggaaagttaaaaagattgcgaaaacagtaacaaaagcaataccactcgcaagtgatggtacataaagtgcataaggattggtagacatttttaattaatcttttcctttgattgtttggtgtctaattgaaatacatttttaatagctccttgacataatgatttgttcctaaccattgcttttatatacatgtttcaacagtgaaccaggataagaggctttggtagagaagttaccgaactattaaaaaagtaattactgtagttgaaaaagggtggataaacaccaaatatttccacttggataaccgttgaaagaacgtttccaatagtggcttgttaattagaccgagattccaataatctgttcaagcctatggaaagacaatagatagaatagaccgaccaaaagacattaacaataagggttgctgttaggaaattggggcttatattttatcttcggagtgttgaaattttaagttttttttttcattttgacatattttatattctatactcattaagttactcttttcggtgggtgtgggtattggtaatagcagttgattagactatattattatgttatataggtataaaataaggtatataaagtacttaatatcatataggagcacgtacatagataagtggattctcaggactttcaacgagatcaatatcgtaacttcctctgtacaatcccagccttcttcttcttctaatcttacgtaatcgtcttcttctgtacatttcatcatcaaagaatagtaatcttacaattggacttaatatgagcatgtttgttgagtttgtttgttacaagacttcaaaggctaagaactacttggattaacaagactgttaattaatggatattgtagatgttttatactttaaagtgcctgtaaatataaaaatgctaagccaccagttgcacagcggaagaaacttatgaatttcccgctgtgacggtattgccgcattgggaagggtagcaaacttggtacttcaacatcaccaggcttagatttaaggttttttactgggattatgttcaatcggagttcatatattacttataaatcattaaaaaggaaaggaaagtattttagaaaaaaataaataaataaataaataaataaataaataaataccattattatcaattataattcatcatatggaatattgaagtattttggaggatatggttgattatcaacacattccatctcttcataaatacctttgaaatatttttcaatttttaaacatttttcaacaaattcttcttgatcaaatcctaaaccattttgaaaatcttcattaacttgatttttaataaattttaaatgattctccaatttagtgaatttataattaacccaatctctataaaattggttatattcatttttaggtaaaactgatggtttaactgatgttgtaacacaattatctaattcaccttcaacaccagttgaataacttaaaacaaaactaattctattatgatttgttacaggttttgatgctaaatgtcttaaaactctaccttgaattaatgtacctgatccagttggaggttcaggtactctagttgcagtattatcgccagcaataatagttagtttgaccaccttgtgcctcttctggtaaatctaacattataactaatggaattgaaattgaatcataatgaacacctaatgttgaaggtatatcttgtccatcacttgcatcttgtctctttaaaatttcatcaatttccttttgagattgtggataattatttaattcttcatctaaatcattagttgctaatgaaacattaatatgaactaaatccatatcccaaacaggtttcattttatgaccaacaaatgttgaaacaatttcagctaattcatctgatctggctaaatcatttgtaaattgtgattttgaaaaatgattaccaatatggaaatctaatctagttgcattttttgataaatttggtaatcttgcatgttcttcgataacatttggttgtaaagcttcccataaaagcatattaacagcttcttttgaaagtaatttgaatgggaaagctgcaccaaaattgttcaatggttcaacatgagttttaggttatttttaactcatctaatgtaaaagttttagtttttttataatcttcagtattgaaaataatatgtttctttggatcaaattttaaatttgggttgaaacctggagttttctcaattttttctacaaatgatttaatttcattttcacgtgtcttttcaggaattttataatcttgacaatgagttttataagattcaacgagtccgttagatttaagtgggttaggatataaggtttgaataccaacagtcattattacttgtttaataaaggtaaataaagttttattgttaattaaatatgaatatagaggagaataataaaacaaacttgattacagtagagaggtatatagtgatatttatatcaataagagacaggtgtgaaaacaatcatatatcgtatctatctatctatctatctatctatcttatcagagataggaaacattaggcataaatcacaataagctgataagagatgagataaattttcaaagtttcctaaaagggaaggcgaaatcaggagcgagtaaaaccgaaaaatttcccttatattaaggatttatctccattaaatgaactctcttactccgatatactggaatcacttatttcatcaccaagtagagccgaactgatctgtatttattctaattataacatctaccaaatgatattttttcaaccaatctaaaccattggtcagatgtaaatatctttaaattaatattttgtgctcgaattgccatatccctatcatctgaaacaattacattataacaaaattctgttgcttcaattttagttaaaacttttgatttggaacttataaataaacttctagttgattcaccacgtaatcccgttgtattaactggtattgtattataatcagaatttttaattgaattccaatttttagttttatgattacttggagtttctaaaatttcattcaatttgatcatttaattcaacttcttgttcatcctttatattgtaatttccattggtattattattattattattattattattattattattattattattattattattactactagaatttggattagaagttgggaaataattatatgaatatccaccttgatatgatccattataaataccagtaattttacctggttcttcaaaaattggtaaatttggtaattctccaattgaatatccatatcctaaacataaatttttaccaaatgcatcatttaatttaatactttgtaaaattaattcatcagaattaagtctccaattttcattattctcaaattctcttgtttcattaatattagttgcagttgtaccatctgatctaattgctaaaacaacatgttcagcatataattgtcttgcaattataactgctcttgttgcactttcagctactaaactatcatttgattttcttaatgatcttaattcttggaaaactgtcaatggtatagctaatttgaaaattcttgatctaacacatttaaaaattttaccacaatgttttaaccaaacatttgtatctaatgaaataaatgtaattgatgtatcacttaattcaccaatatcaccccttataataatttttttattagaatttctcattttttcaatatttttatcaatattattattattaattgtactattattattattattaccaggatctgataattcagtcatttgatctaatggtatattagcactaattgatacaacatcgcttataacttcagtattttttaaattatttttattaattctattattattaatattttcatcttgttcatcttcatattcttcatcttcctcttcatcatcttcatcatcatattcttcatcatctgataaatctgaatcttcttcatgttcattatcctctgtgtttgtttgattattatgagtatgattatgattattattgttgttgttataagcattgttattgttattgttattattactgttactattattattggatttcttatgagctaatacagcaggatattgattattgatataatctgtcataaatccataagaattatgatcccacattggtaactttaggattaatattttcatttgtccaaatatttatatcaaaattatcagatattatatttgtattaacatttaaattattaatattaaaacctgaaaaattaatcaattgacttattcttgaatcattaacaaaactattgaaaatttgtaaattattatttgaaatttcattattatttaaattaattgatggattatatttaaaaatattatctgaaattgttaaaccaaaatttaatgaagattgacaaatataattagataataataaaattctaatatatctttcaccatcttcatgagaattataaatttcacctgataatggagtatcgaaaatatcatttttgataccagtttggaaaacattatcataatctaattttaatgaaattctatcaaaccaaagagatccccaacatttccaaacttcccataaagtttcatttgaattaaaataattaaaaattaaatttggatatactttttttaataataatttatatcttgaatttaattcaggtactgatcgtacaacacataataaatcatttaaatataaaattaaaattttccaaggaaatattgcctttaaaagtaaataaaacattggttttgcatttggataaatttcaattgattttataacactaataagaaaatacatccaaattataacatgagatgttgaagtttgtacaggacctgaaaggtattgtttaagcattttcattgataattcgataacacctttattagtttcattcaataatttaaaccagaaatcgtttgataattgattagcagttgaatttgttataaaatttggatcatttatatcgaattgttcatcatcatcatcatcatattcttgatcattatttgtatttgtatttgtgttatcatcatcatctgatttattacgacgtttatctcttctatcctttttatctttacgttctttaagtgcaattggtaaatcaaataatttagcaaaaggatttgaaactaaacctaaacctaataaatgataaatatttgataaagcaaaatctgcacctttttgaaaccaaaatttaactttttcattaatatcaattgaggaacaatctaatctaatttggaaaaaatctatattagtattatcaattccaaaatttgatgaataatgagatacaattttaatcatttcatcatttatattataatttggtaataataaaattttatgaattttaacaaaagtcaatcattgataattctatatgagttaacatatttctctctgagcaaacattatcaattatcattcttaaatattgagaagttggaacaaatggatctctacaattaacggctttaccaattaacattaaagcttttaaattatcattttcaactgaacataaatgataataaatttttccatgaccaaattgagttttaattgattctttataccaataaattgaagaaattttccaatccatatatcttgcaggatataaagcaattgccattctacttaaatcacctaatttttcacaccaccaagattctatacctaattcaggatcgattaaacatgaaattatattgaaagaataatttataaagcaagcacaaatttcatgttccacaaatactgaaataactgattttaaaacttctaagaatgcaacaataccataaacccacattcttttcaaaattctataattaattactaaaggtttaccagattttgaagttggagataaagcatataataggaaatcataataattatctaataattgagtaatttgtttataaactgaccataattcattatttaattcagggcctgcattattttctcttaatttttgattaatttttgcacaagaattttgagtttcaatttccaagtgaagtattgatttataagtttcctgtaaatttattataagtatttgttcttcctctgacattattctagccgtaggtggtgtacttgtatttgtactatttgtattagtatttgtattgatattagtgttgggggtaatatttgaagacatttgagaagctagagaggtactgttgtttatattgatattattattattattataactattataattattataattattattattactaatgttattattaatattaatattattatactgttttaatctctttaaagtaatttgaggatttgaatttgaatgagagagtctttgacgtttactattagtattgctatgtaatatattgttatttgaagatatattcattgatacagtcccctaatacaggacgttttaattgataaaaaggaagtacacagagctatatattaccataattataaatctaaagctttttccaagtattcgagaaagagaggctttattctgtccacgtcgacaggtcgtactctctgtagggagacgaaggctcttctgtgtctttgcagtgtagctggtgatatattggtggtagaagaggtactgtcactgctatcactgctgagcatgtccttgataacactctgtgtctcttgatcaagtatttgaacataattggcacttaagttaggtagtattatggaatcctttagttgcattaggatgcttcaatacgacgacgtgttttacctaataggattgtccataattcatcagtaattgatggtatatcatccctattagataatgttaataatggtgaatcccatctctttgcaggatcaggttcctcaaatcttgcaattaaagcattttgtaaattaatatcccaataagttttatcattataacctgattgtgaaacaacgtgaataactacatgaggagttgataatgctttactttcacaaaataattgatatctaaaacctctattatatgacattgtatcaactattaatatggttgatttatttaaatgtctcttaactgatgcaagtaatgcagcaactgcttgcttttcaccaattgatgaattatattgttcatgtttaataccaatagtttcatcacttaaaatttcaatatttttaaatggtgattcatctaatttagtttccaatacttctttaagtgaattaacacaatcactcttaccactattagggtatccacaaaataatattaatggcatacttgatttatgaaagagtgatatatattaaatatataaaaagatcattataactaactatatagtggaaaaaaaattataaaaatttttcacttttatataggatataatattcatacaatactatatatcttctatcatatcacacataaatgtttgtaccacgtacggtattccccgattatagagtattattagcacattataaaggacatcaatctaaggctattaaacgtatgggagaattatctcctcaaattaatttagttttagaattaagagattcaagatgtccaatatcttcaaataatcaaatattagagaatatatttagatcaaaggatagaattataatttatactaaaaaggatatgtttacaatacctaaatcattattaaataaatggcatgaaccaagaaatgaaaaatttatttcaattgatacaaataagaaatctgatgttttaaatataattaaattacttaaagattatcataataaattatatcctcaaccaccattaggattaagattaatgataacgggtatgccaaatgttggtaaatcaacattagttaatcaattaaggaaatttggttttaataacaatgaaagttttaaaaaagttgcacaaactggtaatatgccaggtgttacaagaaatacaagtgaaattatacgtatatcaagagaacctgaaattttattatatgatacccctggagttacattaccacatttaaatgatattaaaacagttttatcactttatttaattggtacattaaatcataatgaaattgatccaataattgcagctgattatcttttatatattgttaatttatcaaataataaaagtgataaagttttcaaaaaatatttaaagactccaactaatgatatttatgaattattaacagctgttagtaaaaaaatgaagaatgcaggtaaaattggtaaaaattggaaaccaaattatttaggtagtgccattactttaatacaggaatatagaatgggtaaattaggtaagatatgtatggatgagaatgtacttagaggaatcagttctgaggaattcaatgatagtatcattgaggagaatactagaatacagggtatgcttagtgagagtactaatagtacctccaagacatctaataaaccaagtaaaccaagtaaaagagagagacttgttaaacagagtaaccaattgtttgtatagtaagtataaatagtaaaagtaaaatattttcgttttcgctgtgtttcatctattaagtattattgacatgtttaatttaatttaaattttatagatgttagttctttttttctgaaacaatagcaactatggactcaatattggacttctccaaggatctagatgtctccctattggatactgtagtggagaccttctataaggggaaaggtgatgatcaaaagcaagctcaaattcttttaactaaatttcaagatcatcctgatgcttggacaagagctgataaaattttacaattttcaagagatagtgaatcaaaatatattgctttatcaattttaaataaccttattaaaactaaatggaaaattttaccaaatgatcaaaaattaggtattagaaattttattgcttcaatgattatttcaatgtgtaatgatgataatcaatttattaataataaacctttaattaataaatgtgatttaactttagttcaaattgttaaacaagattggcctcaaaattggccaaattttatacctgaaattattcaatcaagtaaagcaagttttaatgtttgtgaaaataatatgattatccttaaattattaagtgaagaaattattgatttctctcatgatcaattaactcaagcaaaggcaaaatctttgaaaattaatatggcaaatgaatttcaacaaattttccaactttgtattgaagttttagataaagcaactaaaaattcattaattattcaaactttacaatgtcttaataaatatattcattggatacctgttggttataattttgaaactaatttattacctttattaactaataaattcttaccaattgatcaatttagatcaattacaattaaatgtttaactgaagtttctcaattaattgctcctcaatataatgaaaaatttgtttcaatgtttgtaatgtcaattgaatcaatttctaaaataattccaattgatttagatttaaagaaaacttataaatttgcttcttcaaatgatcaagaatttatgcaagatttagcaatgttcttagttactttcttatcaaatcatcttaatgaattagaaaatttaaaacaatttaataatattaatttaattgctcataattatttaattcaattatcaagaattgatgaaagagaattatttaaaacttgtcttgattattgggttaaattagttaatggtttatattcagaaattcaaaatttatcattaaagggttcatctgctttattaaaattacaatataataataataattcttcaattaataataataataatatagaaaatgaaaatttacgtaaaaatctttataatgatattttatcaaaattaagatatgttatgattgaaaatatggttagacctgaagaagttttaattgttgaaaatgatgaaggtgaaattgttagagaatttgttaaagaaagtgatacaattcaattatataaatcaattagagaagttttagtttatttaactcatttagatgttaatgatactgaatcaattatgtcatctaaattagcaaatcaaattgatggttctgaatggtcatggcataatattaataccctttgttgggcaattggttcaatttctggttcaatggatgaagaaagagagaagagatttttagttttagttataaaagatttattagctttaactgaaatgaaaagaggtaaagataataaagcagttgttgcatcaaatataatgtatattgttggtcaatatccaagatttttaagagctcattggaaatttttgaaaactgttgttaataaattatttgaatttatgcatgaaactcatgaaggtgttcaagatatggcttgtgatacttttattaaaattactgaaaaatgtaaaagacattttgttattcaacaaagtggtgaattaaaaccttttattgaagaaattattgaaaatattcaagaaacaacatctgatttacaacctcaacaagttcatacattttatgaagcttgtggtataattatttcagctcaaaataatcaatcaattagggataaattattatcagaattaatgaaattaccaaatattgcttggtcaacagttgttcaacaatcaagtgaagatccaaatttattatcaaatcctgaaattgttaaaattattgcaaatattttgaaaactaatgtttcagtttgtaaacctttaggaccaaatttttattatcaattaggtttaatttataatgatatgttatcattatataaagcagttagtgaattaatttcaacaagtgtttcaaatgatggattaattgcaactaaaactccaaaagttagaggttggagaacaattaaaaaggaaattttaattttattagaaatttatatttcaaaagctgataatgataatgaagttgttagagatttagttccaaatttattagcaacaattttaaatgattataaaaataatgtacctgatgcaagagatgcagaagttttaaattgtttatcaacattagttgataaagttggtccattaattccaaatgaaattgttttaattttagcaaatgtatttgaatgtacattaaatatgattaataaagattttactgaatatcctgaacatagaattgaattttataaattattaagagaaattgatttaaaaggttttaatgcattattacaattcccaccagaatctttccaatcatttattgatgcaattttatgggcatttaaacataataatagagatgttgaaaattcaggtttaacattatgttatgaattattaattaatattgaaaaattaggtccacaaaatcaatttgcaattggattttatagacattattatttccctataataagtgatgttttctatgttttaactgatagtgatcataaggcaggttttaaattacaaactaaattattatcaaaaatgttagaattagttgttaataataaaataactgaaacaatttatccatctgatagtgcacctcaaggtacaccaaattcagttttccttaaagaatatttaggtaatatgttaataaatgcttttaatcaattacaaactgaacaagtttcaaatttcttacaagttttatttaatagttttgataatgaaattaaatttagtggtttattaagagatttcttagttcaaattaaagaaattggtggtgatccaactgattatttatttgctgatgataaagctgaagaattattagaaagggaaagattacatagagaaaaggcaagtagaattggtggtttattaaaaccttcagaaatggaagattaattcaacataatttagtttataatcataatcatttattataattataattattatttagtttatataatttatatagtttattttatagttttcaatgtcttattggacttaaatctctatcgttattatcaatatttccattcctactcctactctttctatcatttacatcatttgtaacaaatgcataatcaatatttaatttattaccgaaaatttcaaatggttcagtttcatgaactttaaataattcaatacattcatctaattcaacaatttcaataaatgcataacctttataaatcctgtttgcttatcattatttaaatgaatattacttattttacaatattcttcaaaaatttcatataaattatcttccgttgtttcaggatgtaaattagttataattaaaatgtatccttcaacagctatttgaaattaaaagttagtatttgatacttcaaaatgaatataacagcaatacatacatttacttaccggtgcatgttctcttgtatatggtcgtgaagcaccagctatttgtatagaagttcattatcctttaacaagagaagggtattagatgatataaacatgcatacaacgcggttcatacatgttacattgtcttttgataatgacttttttcttataaattaatgggtataaacgatacatttgaatcagggttagaattgggtttacaaataactaatgattttattaatatattacaagatgatccaagttatcaattgaaaagaattgttatattacctgatgaaataattaatgaaatgaaaagtaatgacaatgataatgataatgataatgataatgatacagttttaagtgttaatgatgatattgggaaagttcaagaggtctatttaagtaaatcggggatgaagagaatgtttttggaatgttatcaatgtgtttataaagataggtaatgatgatcttaatgcattattagggttattattcataactgcaaatgatacaactgtaatgaataaaatagtcagtagtgggatatagtgataattataaattattaatcacaattggtggatatttaacttgttcatatgataaaactaataaatcatctgttttatggacatttttcaaaaaattgtttgtttcaatacatgatgatattgttgataatagttcattacttcaatatgttgtacaagtttgtttgaaatcaactttagaacatccaagaaattattatgcatgtaattcacttagattttttattgcaaatataaataattcacatgtttggaaagaagttattataacaatattggaatttttaaggaaatttgatgattatagtatttggatggtcttattagatagtatcttagacttgaaaaataatggattcaaatattataggttagaatgggaaagatttggtggtatttgcgattgtaatgatttgaaatatgatgaattaaaaccaattttgaatgatatttataaagatttgaaaacttttgtgttaatggttggaccatatggtggtttagtattgttgaaacaattacacctcaggttgggaattgatgaaggatttgatgttacaattaggggatataatcgaaacctataaggataaaaacatcaatataaatgataaactaatttacaatatgaaaagagtttatggataaagagtataaaaaagtataaaaaaatgtaaaatatagaggaaaagaattgggggatcgaataaataagtagatataagtaaatgaataagtgataaaaaaagatcaaaatattattcttttaattcaatagttttaatcttttaatattttaatcttttaacttttggaaagcaggaatttcaaattttggatcaaaatgttgaccaggtaaaattggtgcaatttcgaatatatgttgacaaaaattatttaaatcatgtttaactaaatcattctttaatgcatgatctttatagataacaaattctaaattttcattaccaaattcacttgtttcttcaattgttaattctctaaataattttggatgaaattcaacaccatcttcaactcttttctttgcagcttctctttgttcttcttcgactttaaatttttcatcagttgcaacttcatgatttctatttgctaatgcatcagttacctttaaccaaagtttcctactttcaaaatctccttgttcagaaatatctctaacttttggttttaaaggttttgcattaaaacaatcaaaaaaggttgaagattttttagtttttaaatcttttatagtcataacttcattccatttacctgtaatttcataaagtttattattagaatccgaatcttcaattataccattaattgcattatatgtaccagatataaaacctttagttttaaattcaatatcagctattaaatttgatgatgaagatttaataattaaatgatcaccaagttcaaattttaaaccaccaaataaaatacctcttgcatacatatttggttgagataatgtgaaaacttctggtaaaccagttttttcatcaattatatttgtaaatgataattttgttaaaccttccatcattgcagcaggttgaattacctaaaaatttagattttggtgcaactaaaccatcaattctaataccatattttggaattgaataaaaatatgaagattttggtggatgatgacttgtttgttctgcaatataataagcttgtgaaccatcaggtaaatcccaataacatgtgaaaaattcacctaaaattggatttaaaggttttttaacagcttttggagcaatatgccaacatgacatataccatttaacaactaaaagaaatctttcaattgaatctttagtctttgaagcttcaattaaaatatctggttgttgaagttgatttgtaactctttctaacattgatttcctttcaaggataaatgttggtaatgtaattctagttaaatcacatcctggtcttaattgagagataatacccataagaattgattgtccttgatcatcgacttcatcgatatcttcgacattgtctggatttgaattaggtgatgatggtttttctccttttcctatattaaaatattaatatgttaataatttgataattaaaatatgttagtaaaagccattctcatataaaatcagataaacaagacagttaaagatacataccacgcaatttagatttaatagaatgcatagttaacagatagatggaatataaacaacaattccagaagaagatttacaccaccagatggttacacaagttgcaaaatacaatactgggggggccaaacagaagaaaatggcatttcgggaagtgagggtcgtccctattttcacaagccgcattttctttattattcttattattattctttattattatcttagctttttctgatatattatttatatatattaaattggtattttgatgatattttattaggtttatattatatttataaaaggttctattgtatattatgttatgtatgttatgtatgttatgtttatagtatattattagtattagtattagtattagtattagtattagtattatgttatatctctgatggaatagccatagtgttggttgtggtattggtattatcattcgtcacttcattcacaagtcctactcccagattgttgctgttgctgttgtatactacttgtccccgtacttgaaggtgcaggactattactttgactttcagtcccactatcaaccatttttatctttttatttatttgttcattcttatctgttttccgtttcttattctttattggtcttttctcattttcatcataaacatcattaggtaaatcccataatttaacatgtttaatacttaatgaacaaatatctgcttgataattaacccaacttttacaaattgaatcaaattctgtacatggtacttgaatattcatctttttctccttaccttgtaaatctaattctaatccaatatataatttcattacatgtaataaaaatttaccatctttttgaacatcttcttcaagtttaactgtatctgtatcttcatcaattttaatctcttctaaattatcctttgcaaattcttctccttgtattgtaccatataattgattcattgtatttaaatcatcttgattcttacaaataaatgatttcataaatggtttaacatatggatgagctaatacaactccattaatattttcaatttttaaaactaataatcttaattttgattcaaccataccacaccatttaatataattttcatatgtaccatttgatgttgcaataattgttaaataatatttataacgataaaaataatcatgtttctcaaataaatctttccaattttttctaccaatttgaatttcattcataatttctaatcctctacttaattcttgaattataattttttgagttgatgcagttatattatgagttgcacacattgatggataagcaggtgttataactggcattctatgacctctatcttgtccataaattttaggattccaaattctaacaggtaatggaccatcttcaattggttttaataaaacaggttgtggccatttccatctaagataaatatagaaaaattttgaaacaattgttgaaccaattgcatttggatataattgacaaactctagcaactaacattgcccatgcgacaccaccagggaatccaaacatatttgcataaattgctcttctttgagcccataatttaatagttcttaaagcatgcctaaatgaagttttttgtggaactaattgtaaaatttgatcagtaactcttgtaccatttaaagctcttaaatctctatcatcaatatttcttaataaattattatcctctagtgttaaatctaatggtacttgaggtatatctaatctaccacaaattaaatcaatatcaattccgtcgaaaacaattttaataattggtacaaaggcatcaggaactggttgaattttttgtaattcaggtcttttccttaataactcttcaaaatcattgaaaaaatcttctctactaacatgttttggtacacaaactaatgtatcaatatctgaacctggaccataaacacctaatctataagaaccaaatgtaaaaattttaccatcctgcatcttttgacataccttcactcatatttttccttcttgaaacattataaacaaaagtttgagttaattgttgtataattgataaaactttccttctcttttcagtttcaacctctgattcaaaagaactttgattccttaattcttgaatcattaaatcatttgaattaatttcttcctttgatggaccatctattgaaattggttcagtaacaccatattgttttttaggtttcactattgtagacatgacgaatagaaatacagtttgattgttatattatactgtaactattaaaagtatataacttctgttaatgatataaaaatcttaataagaaacacgccctctcccattttccaatacttctcgactcagtgaaactctcttttcactggaaaaaaaattcaatttttttctctttaaacccttcgcttaatggggggtctctcaatcgattttttacgcgttatgttatgctctgtatctatggtattagtggtagtatgcatataggtagtctatgtagagtaagattttatgtgtagaatagtattgtgtggactaaaaaagctggtatttgttaaataattaaaaaaaatacaaatttatacaaaaacattttttaaaaaaattaattctaaattattaagcaaaacttttgtttttaaaaaatatttcaagttcaattttttactacaatttatagtgcccttcatttaacattttacctcaaaaaatagtagtttttgtaaaaaatgaaattattttgggtcacgtgaccagtacaccaaaacatgataaataaccacatagcaagaaaacaacaacaagattccttggcccagttggttaaggcgtggtgctaataacgccaagatcagcagttcgatcctgctagggatcagttatcttttgggcgtgtggcgtagttggtagcgcgttcgccttgcaagcgaaaggtcatcggttcgactccggtctcgtccaatatatttttttattttttttttactttaattttttttgagttaattgtgcttttattctgcattttttcaatggcgaaataaactcaatgttattaataatgataggcaatttaaactcattatgatctttttaggcaaattaagctcaatttactaatataaaagaacaactaatcccaacctttttgtaagaatgtaaacttgtaaactttattctataactaacaaactaaacaaactaaactaaatagaaatgtcttgtgcttgctctacaccaaaaactcaaattactaacgcatgtttatgtgatgatagtaaatctaaaactcaacaagagttaccattatgtgcatgtccaaagaaatgtcaatgtggtgataaatgtcaatgtgcttcatgttcagaaaatgaaaataattgtatttgtcaatcaactaaatgcatatgccaaggaagctgcaattgcaaccactgtgaaataacaaaatgtgtttgtcctgaaaacaaaaattctatagggtgtgcttgttaatcaaagtgttcaattctatatgtatatcaatttataataatgctaatttcttttgattcatcgtaattatccaatggtaaatctgtaagtaatgaagttttcaaaaaatgatcaattcttaacttgaaaaggtctatgttatgtttaattggatctttctccttcatgtcaatagtgtatggatttgcaatgtattcgaaattctcctttatttgtgaaattaccattttattattcaatttagttaattttgttaattctgcattatttttataatttccaattaaattgtaaatattaccatcatctgtacctatagtacatagtttatacatattaccttcaattttggtatttttatatgatgaaatagttgttattggactattacagagattaaacatgctatgaatttccaaacttggtattttttcaccataattaacattgatggtaaataaattaccaaaataatcaccaaaaataataaagtcttcagaatatacatcaatagcagatattaatttccatttaaataaaagtttaggtttgattactatatttgatgtatcaattctagttaaataaatacctgcaaatggatcaattaatatactcaattttttctttaattttttagttatagttatatgattttcaacttgtgggactttcttagataaagtaattataaatttaaaatctaatttattttcaacatcattcttaaaaatttccaaagctaaattaaattgcattttataaccccataaaataaatgttctattgtccaattgatcaaaacatgttattctataattcaagatagacattgttttcaattcaagttctttattttcattgataataaataataaaatttcagttctatttcttttaaaataatcttcatcatcaacataatcatcatagttgaaactttcacttaatactaaaaatgaattatttaataatttttccagattataaacatcttcattagtaaaatcattataatcaggtaaaaatgatttaaaattttctaattgtctcatatttgtaacattgataccttcctctaattgataaatagcaacacatatatcattgtcatatattttaataaactctttaaaagtatttgaaatgatatcagtttgagatttaactaatgcaactatgtataaattaagtttgaaaaatttcaaaatttgatgatgttcaacatctatattaaatgatggaattgatattgttgatgaatgactattttgagcaaaataaacatcatcattattatcaattaatgaatcagatattgatgttttactgaattgataaggaatatgtatttttatactaggtatagttatatcatttacgattgtttcatttaattgaataaaatgattagatattttaggtttagagtcattgatttgtttaattgaccaatcttcaatagaaattatactatttgagtattcgacatcattacttctagttcttttcctaattgaagaattaatcgaaatttcgtattctgagggtatataattgtaacttagatgtaaaagatagatatcaagatttgaagttactaaaatgatagacttatcattgagtttatgatatgttataagagatgtatgtaaacctgaatttagtgataatttatttatcaaacgatttaattgtaatgaaattgtatcatcatctttaatttgagtgtaagataagtcaatttctggaattggataaattatatgatgatcattaaagcagaatattgagaaatagttgaaaggtataattaaatcaggttttgaatcgaatctatgaactaatttattttttttaaaattccatgatttacctgatttgattaactgataaaatgataaattatatgacatatcaatatttttagtaattaattgaacataagaattattaaatgaatacatattgatgattatatcatcatttatccaaaaagattgtaaatcttcgaaaattgtatattttggtaattttagtaaattcccatttgaagggtaagtattatctgaaatcatttgaaatatattatcctttgtactcaaaaattctaaaacttcaatgaaacctggacgagttgaaatataaataaatctacctgatggatcaacctcaataaaagtttttgatagtgtatttacatattttttactcaataacttatcaattgaagattgtttatttaattttttcaatgaaatctctaaaatattaatatgtttaacaactttcaattgaaaaaattcatttaacggctcagctgtattttccaaactatgaataaatttatcattatcattatcatcatcattacttctagatttctttctttggagggataaaacatagaaatcatttgtttcagttaatatcaataaccaatgagtaccatttgagccaacaggcaatgaattgaaagcagttatacgagaataagcattaaatgaagataaagtgaaacgatttgaagaaattgaaaaagaagaaattgagaaagatatatgaaagggaggcaatccctgtactagaaggagatcattggggaaagtaccagaaatgggatgtgaatgaaagacattatccagtatcaatgaagacattgatgtaaagttatcagggtattgaaagggcaattacaattaattaattatccaaacagggcaatttttttgtgtaataaaaattatcaacacaacatagaataatgtcataaaataaaaaaaggtgtacaggttaataattattttatttttttcaatagagactttctctctctctcactgcgagtggggaatgagagtgtattacaggttaatttaaagataatacaatactaatattattttaataaacttcccttcaatcaaacggatatgtttgctagatctatacttagaaactcttttagagctcctcttattaagagatctttccatcaaagtactattaataaatataatattgatgcagaaattaaatgtcgtgaattacttgataaattaccaagtttagaatatttatttcaaaatgaggatggttccaagagaactccatcagaggaagaattgaaaactattgcatatttaaatacttattcaaatgagagaaaactttcattaattgaacaattatttacatttccaaaaaaatatgaagatttatatttagaaaatgattctgatttatataaattaaaggcatcatcaggtttaattattgataaaattccttatgaagatactgcaactggtgaaattaaatggaaaattgttagagatggtgaagaaaaggaaggttgggaaaatattgcacatattttattcgttcctgcattttgtttccttgcagttacaattttttggagagatgatatggatgttactgaatgggcaaagagagaattattatatagagttaaggcaaaggcagaggaagaaaatgatactgcagttttagaaactttccaaaaatatggtaatgatccaacaagttataaatttgatttagcttcatttgataaaaatgatgatgttatcgtagaaagaattctttcaggtgaatatgataaattagctaaattaaaggtaaaacaatcaagtattgaaaattagacatttattattattcattcttctatctatttattccatctcttattattatcatatatatatatatataaataacatatactatctaactacatctatatatcttaatataaatattactaaattattacttattattacaataatctattatacgacatgtatcattgtctagaaattgaaacctcctatataagaaatttttagtgtgagaaatcatgttttgttttatatagcgaacagcaatttattttatttttattttatcctacttagtactacatattttagacgctaaaaaccgcgatttttttttatttcctgaacaacatctttgggactttccgcactaacaaatgtagccctttttcttatctgacctctagttatcgagttatagccctttgaagttgattttttcgatttttcaaacgttcatatctttttctttatgggtcattgaaacacgctcattgtgtcattagatttggaattctttgaagtttgtttagtaatttacttgggatcattggagctttcctccgtccttgaaaggaatttttagttttctgactttttgtccatttttgaccactttcaactgactctggctccttcaaatatccctggaggtatacttttgaaaaattctgtgtgtaggccgtattactctcttcccaatgacaccatttttagtttttcaagtaagggtaaagtacattaaatatccatttttcagtgaattttggacgttttttttggggttttttcaagctatcttttttgttactttttgttaacaagtttaaattctcaggaattcagtttgtagatttgtttctaaattattatctgttgtgaattatggcggaaaatgtttttgtagaaaaatgttatcattcaatgtgttcaaattttgctctttttttttggcaaaaaatattaaaatagtgataacttttttttgaaagcctaactaaaaaacaatatttgatattttgtagagaaaattttgctcttttatatggtactgttaacgcctgatttagaagagattggaaaatgtagtgccttaaattaacgctgattttaacgcttttcaaatagttatagtgatagttgattacgtaaacgcgtatttaaaattcatgtagctgaatttttcatgttacagatttatttcagtgtctacagatttaatgaattctttacggtttacatactcaaaggtttaccattgtagtgacatttgttattattagcttgctattaaaaataaaatgtgtagtagtaagtaggggtcaaaatttcccgtagggaaattgaaattaccaaacccaacgctttaagcgtcagtttccccgttaggggaaatgacaaaagagtcgattaggttcgtcacgcggaaactagttttattttatttatcttgccaccaagggatgacacggttttccactggctctctatcttttctcttcttctttcctctccttttcctttctttctattcttctccaagacgtctgttagttaattgaatctatactactctcaaggtacaatatcctatatttatttactctttgcgttattagtacacatcttagttctatcttcattattttaaaattttaagaagaaaaaaaatacttgaatcaatctaaattaaattaaaagacattattactattattattacattattattcacaatatgacaaatatttctccaaagataaattctgaaccatttcccggtcatcatcaatcaagtcctgaaaaattaaaattatctccatcaaattctcatcctcaagataaaggtcatagacgtagaagatcatcaagtttaatctcaaaagttcaacctgaaacttttgaaacaaaacaagatcaagatattcaagataatatgaatgctaattgggttcattttaaaggtgcttggatcattcatattgttattattatgctgttaaaagttttatatgaattagttccaatttttagtaatgaaattagttggactttaactaatgttacttatgttattggatcttatataatgtttcaccaagttaaaggtactccatttgattttaacaatggtgcttttgataatcttaatatgtgggaacaaatagataatggagctcaatttacacctgttaaaaaattcttattaggtgttccaattgctctattcttaatatcgactcattattcaaattatgatttaacattgtttgttgttaatttaattgcttgtttagttgtggttattccaaaattacctttaagtcatagacttagagttaatattccttatttaactgatcaacaaattgttgaaggtatatgattaattccaagctaagattcaacatttatgttattattattattattattattattactaattcaatcatatatgttttttttatttcattttgaattttaaattttcattttgtttatcttatcgattatcttatctcttttaactaactttatatccatttacctatataatatgactatatttacataaatattacaagaacacagatttattttcaacctttttaatttacatacattatataatacacatatgatcggtgatcaaacaactaattctttttcacatttattaaatatttcaaactatcaattctaatatttaattcatcaacgtcacaattaaatagatcttctaatactgtagaatcaaacattttatcgtctccactaagtctccattctccaatatatttttgaaataatttccattcttctaaatcccattcatttctatatggtttcttgtgaattttatgtattaatctacgtattattctttgatgtctatcaattgatgaaattgatgttgaattggtctttttagtcggtatttcaacttttttctttgttgctgttgttgttgatgttgatgctgatgttgatgttgaggataatgtttttgtaaaatcatcatttattaattgaggaattgatttggctaattcgtttggttttataggtttaaaagtaactttcttcttttcaatttcctttattttttcacgttcttctattttacgttgtctagctttctgtttccgactatcaattaatttttgtagaagttttagtgctatttcatcatcatcctcatcataaataatactatcatcatcgttattattaccatcaactttatcaactttatcaactttatcattgggtataccaccttcattattagtctttattatttcttcaaatgacgataccttttccgatattttctcaattgaaacagattagttagtttcagttagttcagatttagatttagattttgaatcagattctactttttgtttactattattacctataaactctatattatctacatctagttgattattagtcagtgggattatttgaatagattgagcagtatgatgtttcttcttaggagatgaagtgtccaagacatcatctatagtactcaatttgaccatatcctggttagtttatcagaataaccgagataaacactatctcaacataatcataataaaccctttattcgatacaatacgataataagtcaaaatttcatgttgttacgtaatctttaatatatctctgcgggtaactttgattctttctaaaaaaaatttttatttttttttctttttttaatttttcacttttcattttcattttaattctaatttttattttattttggaaaatttttactacattggaaatctttattatcttcctttctggttccaatctcactcaattgtatcacaatggctaccggtaagactgaaaaggcacgtcgtcaaagacaaggtgatcttagagatggtaatttacgtgttaagggtgaaaatttctatagagatgctaaaaaggttaaacatttaaatatgtataagagtggtggtgcaactcgtaatgcacagggtgaagttatcgaagctgcttatttacaagatactaaaattccaactgctagagttgatccaaatagaagatggtttggtaatacaagagttattgctcaagatgctttaacacattttagagatgcaatggctgataaacaacatgatacttattcagttttattaaagagaaataaattaccaatgtctcttttagatgaaaaagattcaactgaatctccaacttctaaaatcttagaaactgaatcttattcaaaaacttttggtccaaaagctcaaagaaagaaaaataatattgctgcttcttcattagaggaattagcttctttaactaataaagataatgaagattttgaagaaaaacaagttttaaaacctgttatgggtttaatgggtggtattgataccgatgatttcacacctgaaacgaaggaatatattttttcaaagggtcaatcaaagagaatttggaatgaattatataaagttattgattcttctgatgttgttattcatgttttagatgcaagagatcctttaggtactagatgtacttctgttgaacaatatattaaaaaggaatgtcctcataaacatttaatctttgtattaaataaatgtgatttagttccaacttgggttgctgtaagtatttcaaataagatttttcaaattgatttattccaattgatttatttttatatcatatcatactttcattttcattttcattttcaaatttattcattttaagacaccaaagattttgtcaggatattctattaaaataagttttttcattaatttgaaattttttattttatcataataattcatatagcttatctgttacatccttggaagattaatgacatcgcccgatttgctctccgttttggagttgatttaatcaacgagacttcgttttgaaggatcactttagatgttctgcggattctatgagttgaactttggcaatcaattattattattgatttttcatcatgccgttgttcgtagtaagaaaccgcacaattgtagtattttcagtttttttttcagttttttatgatactatatgaaatgatatgaaattaaatcaataaggaattacaagattgtcaatgtcaaaatattcaattaaaaacaaattactaacatttaatcaaaaccaattataattttattataggctgcatgggtcaaacatttatcaaaagattatccaacattagcatttcatgcttctattactaattcatttggtaaaggttcattgattcaacttttaagacaattttcagttttacataaagatagaaaacaaatttctgttggttttattggatatccaaatactggtaagtcaagtattattaacacattgagacgtaagaaagtttgtcaagttgcaccaattcctggtgagacaaaagtttggcaatatattacattaatgaaaagaattttcttgattgattgtccaggtattgttccaccttcaacaaaagattcagagagtgatattttatttagaggtgttgttagaattgaacatgtttcatatcctgcacaatatataccagatttattagcaaaatgtcaacgaaaacatcttgaaagaacttatgaaataagtggttggaaagatgcagatgaatttattgaaatgttagcaagaaagacaggtaaattattaagaggtgcagaacctgatgaaactggtgttgcaagacaagttattcaagattttaatcgtggtaaaattccatggtttgtaccaccacctgaagataccgaagaaagaacaggtgaagataaaaaggcacattataagagaaagagagcagaaagagaggcagctgcattagaagctgaacaagctgaatataatgaagaaaatgaagaagttaatggacaaattgaagaatctgaaaataaagagtctgaagaagtttcagcttcagcttcagcagaagatgaagatgataaacgtccatcaaagaaacaaagggtataaaaataaataacaaaagaacttaaaactagtgatttgatgatttattaacttttaattaatttttatttgctatatcttatacttattcccttctatctttttacaacctttcaccaatttatttatatttatataatttgttttgtcccattttgctaatcgtttatttacagtataatattaatatttacaatagattttctatatttatattatagaaataatccctattgtagaaaacggcctatataaaaatctgtagaaaattgcgaagaaaatcaattcgaagtggacgagtaatttgaatgagtattaatggcagtaatattttatgggtgaaataattgctttgactagtttgccttccttttcccctgtattacatggctcagtttgttcaaacaatgcaatttcaacagaaacaacagcaggcccaacagcaggcccaacagcaggcccaacagcaggcccaacagcaggcccaacagcaggctcaacagcaggcacaacaactacagttgttaaatatgttacagcaacatcaagagaatgctaatttgaacaataacaccaacaccaataataataacaacaacaataataatagcaataataataaccaaaatgctaatgcaaattcaaattcaaatacaaatcaaagtgcaaacaacactacatctaatttaaatttaaatcaattatctaatagacctcaatcaccagcaataacatctcaaaatagtcaacttcaacaagctttacaacatcaactgcaaatgcaacaacaagataagaaaagtcaaactcctttacaaagtttaaatcaagcacagggtttaatcaattcaaattcaatcagcacacctggttttaatccagctgcccaacaaggcaaaaataatatcactttagctcaactttatcaattacaagtacagcatcaagcacagcttcaagctcaagcacaggcacaagcacaggctcaaggacaaggtcaaactcaagggcaaacacaacttccatcattgcaacaacaacaacaacaacaacaacacaacagcaacaacctttacaatccttgcaacaacaacaacagcaacagcaacaacttataaataatctgattccaaatattgatcatacacaatcaactgacgatataaacaacaaccagttattgtcacaaaaatatcaatctcatttaatgattaaagaagtttggaaagaaaatttagaaactgaaatggttgcaattagacaattagctgaaagattcaatcatatatttttatcaacagaatttgcaggtatagttgcaaggccaattggttcttttagatcaacgaaagattatcattatcaaacaatgagatcaaatgctgatttattaaatttaattcaaataggtataacattatctgataaagatggtaatagacctgaaggcgtttcatctacttggcaatttaacttttattatgatcttgaagatgaaatgtttgataaagaatcaattaatttattacaaaacactggtttaaattttactaaactgaaatcaaatggtatagatagatttgaatttgctcaatgtttgattgacagtggtttatgtttaattgataatattacttggattagttttaatgcaggttatgattttggatttctattatcattaatgatcaatagagaaatgtcatcaagtgaattagaatttgataatttactatctaaatatttttctaatttttacgatattaagttgatttcttctaataaaaatggtgccactttagaaaatttaacagaagaattaggttttggtaaattacttgaaatggccaacttaactcaagttggtggtcaatctttattaacttatctatgtttctgggaattgaagagacttaataatccaattgaatttgagaaattgaaaaatcaaatttttggtctatatgatgcttcatcaacaattaatcaaactccaattaataaattacttgatttaccttcaaataattttgcttattcaccaaaaccaaatattgttaatgatcttgaactaaaccctgaacagttattacaaaatcaagcacaaatgcgttcacgtgaacaaattatacaaggattacaacaatcacaaaatttaactcctgctcaagcggaattacgtttcatggaattatctaaattattcaaatctcaaataagatcacaaggtgatgtaaaagctagagctaaattacaagcacttgcgcaagctcaattacaagctcaacaagcacaagcacaagcacaagcacaagcggcacaagcacaagcggtacaagcagcacaggcacaagcacaagcacaagcacaacaagcacaagcacagcaactacaagcacaacaattacaggcacaacaattacaggcacaacaattacaagctcaagctcaagcacaacagttacaacaagcgcaaggtcaagcgcaaggtcaaggtcaaggtcaaggtcaatctcaatctcataaccaaaatcaaaatcaaaacatatcatcacaacaaagaccacaactggttgacaaaacaccattatcatcaaattctaatttatttgattctaacaccggtgaatctaatagaaatgaaataaataatcaacaaccagctcaaacaaatattggtaatcaacaacaatttttcaataatatgaatggaatgcctaatggattaccaaatggtatgatgaatggtatgatgaatggaatgccaaatggtatgcctaatggattaccacctaatggtattcctccaaatggtatgcctcctaatggtattccacctaatggtattcctcctaacggtattccacctaatgcaatcccaccaaatggtatgccaccaaatggtcttcataacggtatgccaccaaatggattacctaacggattacctaatgggttaccaaatggtatgatgaatggtatgccaaacggtatgccaaatggaatgcctaatggaccaccacctaatggtattccacctaacggattaccaaatggtatgccaaatggtatgaatatgaataatttcatgaataatatgaatggtatgaataatatgaacaatatgaataatataaataacatgaataatatgaataacatgaataatttaaacaatatgaataatatgaatggtggtatgaataataatatgaatatgcataatatgaatgttccaaatggaattaatggtaatatgaacaatatgatgatgaataatatgatgatgaataatatgaatggtattcctaataatggtatgccaaacggcttgattaatggtatgcctaatggtatgccaaatggtgtaaataatatgaataatatgaatacaccaatgaatatcaatgcaccaccaggtctttcaactgattctaaatctaataataatcaaaatgttatgtttatgaatcgttaattgccacaattctaatagatgatttatattacagctacaattcatttatataattatatagttttgtaaattacacttggttcaattcaattactcagagtgttaatcaaacatgtatacttaactaacagttaaactttaacgaagaaggtactggaaaatagaaaaaaatggcgaggagctttttcttggatttaccagtgggacttttttggagagttttacttacagtggcaaaagagttattccttttgagacagtaaaccccgagcagtttagtgtgttaaacaccttagaataaaagtacatcccatttataaacaaaactaaaaaagatatctaatcaatatgacttttgcagaatatgaaaaagatccaaaccatattatcaccggttttataacatattactataaccaactttcatctgatccatcaaaactttatcaattatatagggaagatgctgtactgaagcatacaaatccttttgaacaatcaaaggataccgctgaagatttcaacacattaccaaatattgaaaaatattggaaatcattaactgttttatcatatagtaaaattgttattttaacagttaatacaattaaacaatctgacgaatcacttgttagtacaattgtcggtgaaatacttcttcaaaaagattatgataatgatgatgatgaggataaaatcttaccaactagaacattcactcaaacgttcatactttgtcctgatgaaaaaagagatagttatagtattaagagtgatattttagtttatattccattaattgactatactgatgctgaagttcaaaatatctctaaaggagaaacaaatggctcaactataagtgagatcaacgataagccagaatctgcagttcaacaagaggttgttgaaaaagctgaaccaatcaagagtgaatcaaatggtgtcaaaaaagttgaatctgatactaagaatgaaattctaaataataaatccaataatgttgaaatatcatctagtaataaaatatctcatactaaaaactcatctactagtaaaaaggcatcaccatcttcaacatatacatccaaatcaaccaataatagatctgaatcccataaatcaactgaatcaaagagaataatatcatcatctccctccccagtaacaaatacttcatctgctacaccatcaactgcagcatcaatttcaacatcttcaaatacacctgcatcaacagaaccatcatcttttcaacatgaaacaattgagtctcaaatgactgcaccgtcatctgctgtaaagtggcaataactcttcttcagaaactacatcagcaccaaaaacaccaaccactaaagtacaatcagcagcaaagttaacagcctgctccaacaccatccaaaccaataagttgggcaaataatcttaagaataatacatctgctccaagttcatcatctactggtaaatctgtttcatcatatactaaaaccatagttacacaaccttcaactgcaccatctacttccttttcaactccaactactgacaacaaaagttatgaaatctcaattacttgtaaaaatggaagtttacaaaaagatgcaattgaagctgcacttacaaaggaaggagtattatttaaaaagcgttcaagttttacaatataatgcggttgcacaatttgattccgaagaaatgctacataaggcattagataagaaagtcattaaagatcaacataaaaatgatctagtaattgagaagagaagaccatataagaagaaatctagcaagaatagcagcaatagttataatcataatcataataattacaacaacaacaataatgatagaagaaataataattaaatattaactacgccattatagattatagtttatttaaactttgtatccatgataaaatttaatcaattaattaagattatcacagaaaaaccttgcatatacacctgtgcagttataaacctttataaaatgtataaaatgtataaatgtataaaatgtataaaataaaatgaataactaactgagaatttcgtcaagaaccttttgttgagtcatatcatcatcaattctcgacatgtttaagattaagtttccttaaagcatctataattttatctcttgggaatcccatatcttcaaaaattttaacagtatttttatcaataccatatttttcacaatcatcaatatcttgattaataattttttgattttcagcaagtttagtaaaatcactgtaatcttccttaccagttggtttataattttcatttggagcataaattttagtccaatttgcagcagtttcagcaaatttcttcggatctgataaatatattttagcaacttgtgcatcttgaggatctgttggttcaggactttgtaacagactttgtaatgaaattaatgaactctttaatgttaatattggtgtccaagcatcttttaaaatatctaaacaaattgcaccagtttgtgatgaaatatttggatgatatatccttgtatcaaatttcataattggaggtttaaatggatattcactaggtattttaatatcaacttcaaataatccaccttcatatggggtaccaggtggaccaaggaaagtacctttaagatgtgagagatcatcatcttctgccatttctaatgtaacaccagataattgatcctttttaacatcctctaattcttttgcaatcctctttgctctactcatttatataattgttattactatctatctgattaaagaaagataaaagaaccaaggtaaaagcaaacaaagaaaagaaaatggttgtaactattaaagtttcccttccagaaacccaagatccctcagtaacattgaaaatctcccgataaatttattatattgattatttcatcaaggtttcattcatatgatggatacatgtagtactgtagtacatagacttttagacaatatataagtatatatataattagaatataaactatagaacttgtctcattccagaggctgaaagtgcttgcccttcattcaaattctctaagaatgaatgttctctcttatttcttgtaagtaattgcttggctaaaaagagtaacatgaacaatatggatagtccacctgcaactaagtaacagatacctaaacccatatgtcgaccaccaacaacacttgatgtagttaatatcaatgattttgtaccaccgaaaatagtaactggataattcatttcaatatctatactatatttaccattccttaatatactacccttttctgtatgtttaccatacagcttcataaaacttggtaatgctgctgtcttcatccaattcataaaatgttcatttgatgcaagatctaccaaatcttgttcatcatatccatttggataacgttccatccaattgataggtggtacaatatcactaacattatatttactaactttatatgttgttaaatcggatttccatgcaattccataagatgaaaattcataattattaccattatcatcaatactagttaaatttgaaaaagtatcattaaataaagaatttgcaactaaaccggcaggatatattattttatcatctctgtatctcattggatcacatttagatgaaatatcatcccatgcaactgcttcacctctaagttgattccaatcatatgattcaacatatttacgatgattttggtaaaagtttgttaatttataatacatgaaaacattccctttaatatcatttggtatttcaaattgaattgtacatgttttcctatcactattatatgaccattgtggtacatcattattggaagttttaaaatgatgactataatctttcttactcatatcacttagatctgatgatgccttactatcacattcactataatttatttgtaacatttcaacattataagtcgataaaaatatcccaataccaataggaataaatataactgctgcaagtaaaagcaacggtatcacaacttttgcagttaaaactggttgccatgattttagtctttgttgtctgaatgcagtatttggtggccttctggaatgtaacttctttgcaactttgttacgtaactcataatcttcatcatctgaatcatcatcagcggtaccacggagtttactaaccctctttcttagactagaaagcatagtgcaattgtctgtagttgttgattgctaagaattctctggtgaagaaattgaccttaatcaatccaacatcaatggaaaatttaattacatgcgaaacctattttcaacgcctcttttaccttactttactttaaattcttattataatcattaaaatttaaaatctattatacaatatttttatatatatgtcacgtatttaaaatgtaatgcaaagcaaagaaaagcaaagcaaagattacattcatttaacagaaacataggtttctggtgcagttacaggtgaaacagttgatccactagtagtactacttgcatgtttaattaatgctcctaaaacattttcaatttcgggtgtaattttggtaaatggtaatgatgaaaattcataatctttattctttaataattcaataaatgtaatcaataatccccatggatgtggtttgtgagaaataattctctctaataaaactcttgaaattaattgttgaacagcttctctcttatcattccataatgtcttagatccaaagaaatgtaaaacgatacaactaaaccaatgtgtatgtgcattaggatatcttaagttatttgcaattgcttgtaaaatcaaaaactgtaattcaacatctccttcttgcattaatgaagttaataatgtaacttgagaggattttgcattgaaacttaaactatttttagctctttcatcaacgtatgaaataccaacatataaaactaatgaattaatcaattctgtatcatatttaatcttattgaaaccattaccacattcagtaacttcttcatcaagttcaacaacatgtaaaatttgtcttaataatgaattagatggaatcctcaaataattatcaacattctttttaatgtgtttcttaattaatgtttgacttggatcagaaagaataattggtggaatactaatttcaggtaatctatcaacttttaatccttgttggaatggatctgggaatttcatattaaatggaacagcagataaaatcatatttcttaattgtaagaatgtcattgatgttgcactaactaatggattataccattgtgctaaatattcaggataatcatgtagtaaaaccaaaaagattctaatagtacctttataaataactgtaatggattcaggaattgtattaccttcaatatatccactttggaattttaataatttgactagtaatgctgtaagcttttcaccacaaacttgattttcattacttaattcaataataactggcataaataaacgatgtgaaattaaacacatccaagcatatgtgaaacctgggaatgccggtggttgtaaacataatagaaaatctgcaatttttttgtaagtttcaacaaataaaccattataaacattgatctcatcttcattacttgcatatggttcataattcttacctcttaatgtagttagttcagcaaataaagttgagaagaatctaaaataaggacgttcattgaaattttctttattaacttcatgatcattggcaaatgttaaaatgaatacagagaaaaatttgtttaagaaatcaattctagtaacattatctgatgttgaatccttttgaataaataatgatgtaacaactaacttcgctaatgaatcaattgatgtataactttctattgaagatttcttgaaattatcagtttctttactaaaagcaattgttgaaacttctaatgcacttgcaaagaattgtgtaaataaatcagatttagttaaaataccagaatcagccatttgtgaaataaacgcaatttgatatttaggatcatttgaaaatttgtataatttaatccattcagagaataaataaaccatatattcttcaacagtaccagttttaagtaatccacttttcaatctgataattgcatcatcacgagttgaactagttaaaatatcaaataattctttaacattttcattttctttaatactttcatcaccattttccaaaactgcgataagatcaacaaaatcagatcttaatgcaactggatttggaccaaaaacaaattctttaattaaatcacaagcaaacgcaattattttaggattcttggatgactcaatatttttagccagcgcatatgataaatcacttaatgaaatgaaaccttcagtaataaatgtcagaagaatatttttattatatttacgttcatcatctgaagttaataaccaaattgtaacatatctaacaacaactgatgaaacatcacaaatattaccaatcaagaaaataaatgaatcaataaataattgtgatggttctgtcatactgaataataaattaataaaaatttgaacatatttcatgtaaagttcttgttgagcaactctactcaatgcatgaacaatttcaaccaataaagttttgatagtctcagtttctgtaatactatctgataatctgacatttttatcttcaaaaccttcaatagctttgttaatagcttcaatatgttgattgacaaatacaattgtttgttctaaaacagcaacaggaacaacattttgaccttgattttgtaatctaataggagcattgttcatttgctgtggttgctgaggttgctgtgcttgttgttgttgttgttgtggttgtggttgttgctgaggttgttgctgctgctgttgttgtggttgttgttgctgaggtagttgttgttgttgctgctgctgctgctgttgttgcatttgttgttgttgctgttgtcttaacaataattgttgttgtaaaactctttgttttgcttcagctgataactcgttattaccactaatatctaaaccttcattattcatttgacctaataaaccaagtttatctctaccaaattcatcataaattgaaaattgagcagctgaaacaccacctgtttgaatacccagtggttcaggtaatgattttgcatattctgatgcattttgtgtatcacagaatggttgatttggtgacgtaactttaaattgtcttcttaatgcaatatgtggtaacattgcattatccatatcatgaacaactttttcaactgctgctttttgaataattgataatgctaattgaagattatcatgagctgctaatggaatttgttcagcaattgatggatcaattggatttttcaatgtactcatataatgttgtaaaaattgttgaagattgtttttaattgtatcacgaactagatctgatgatgatgccaaaattaaatgttctgcaaaaaatctaacagtattaatataagcttttctaaccttaaaatcatcaacttcatatgcaaaatctttttcaattaatgccttagttgtaactaaacaaacagtatttgttctatgaactaatggaggtaataaatctttaacagctttagtgattgatagttggaaaatacgttttaaagcagggtggctagtgaaaatagtattaccaagtaagttttcaaatgcattaaaaccttgttgttgattttgttgttgattgataagaccagcttgttgagctaatggagtaccatttgaaactgctggggaattaacaccattacgtgcaagtaatctttgttgttgcatttgttgaatttgttgaatagtagataattgttgttgctgttgttgtaataaattattattgttggataattcaggagttggaatgattgcaggtaaacctctcttttcatttaacgccattctagccatattataaaccaatttttcagattcaacagagctgtataattcattgaagttagtggttctgatgatgttagatggctcaattgttttaagattaatttctaaatcattgcataaaacttcaatttcaaattttaaattcaatctaattgatgcaaattcataaatttctttcaaaatttgtaaaatacctaataaccatggatttggatatttgaaaattgaggaatttttagtttgatctaaaattttacaaatcaatggaataatataatctaaagtattttgattataaccttcaagtaataaaaatttgaatgagaaatttttacgtaaaattggatgatcatttgataatgaaattctacctaaccatgaacctaaattctttaaatgtgttttctcagttgatgataaatctctattttcttgattttgagttttataagttaaattcaataataaaataattgatctaatagtaataatcgtgacataagtataaaaatcattggaatcaattttttcaacaaatgcagcatataaaccttgattattcaattctaattttactctttgattaaccaaatattttgcaaaccatttataatgattaggttttaataattctttcatttcagttgttcttgcatctaagttattttcactgacattattaatcataaataaaattctatcagaaatttcatttggtggaatttcttgaattgcataattatatgataattcaggaactgaaagtgcgtgatatttggatattaactccggatcatctttcataatattatttttcaaagtattaacattttcagtttcaggatcattggttggtaaaattttaccattagcaatattttgacaaacttcatataattcaggttgtgattttaaatcaggaatttcacataacattgaacaaaattttgggaattcaggtaatcttttaatgaaagagaataatgcttgaattgcaaatttaaacattttactttgagttggttctcttgccgattctaaaatataacgtaaagaaattgataatgcaggaccttcaactaatttgaaaacaattgtattaccaaataaaactgaagttgttgctaatgcttcaacaggatattcagggaaaaatctatattcatctaataatgaatgaatcatacaagcgaaaacatcttgatcatgaggattatcagaatttttcagtctttgtaacatatgaacaatatctttaatttcaatttcctttttatacattttttgataatataatttcatttctttttcaacatcaggtgaaaaagtatttgttgcactattcattaaaattgcagaatcatgaccttgaccaaaattaattaatctaggataagcttgtaaacataaagtttgtaaacttcttgatctttcaaataattcttttggtagtttttcggaagttaaagttgtcataagtaaataaacagtttgtaaatctaaagttttattgatttttttaccacgttgagcattatcataatctatttgagcttgagtacttaaataatcaataattgttgtcaaaacaattgatgaattattttctaattcttttgtaataaaattattaaaatgtttccaaccatattgagagaaaacaattgcaattgagaattttttttggaaatcatcaccactatctaaaattaaatttataattttatcgtctttaaaagttgcagttaaattagcaattttatgaattgcttcaggatttctctttaaatcaagatatttaaccaataatttaccaaattcagtactatcatattcttcaaataatgcaaaaattgcatttaaataaggtgaattcatatctaataaattaataaagaagttttgcataatattagttatgatctcgttttcaccagcatttaaattttcatgtaataaatgtaaacaagctaaaatcatatattcaggtgcagctctaatatctttattaaaaatttgagaaactaaattatcacttaatttagagaatgttaataatgcaacagttttaatttccagcattacaatgaatttatagtaaagtaataattgtcttgaattagtttcagttgatagaattggagttaaattagaattcaataaatcaattgcaccagaatttggatctaaattattaatatttgttaaaatttgtgttaataaatgaatatctgaagatttacaaacaattgataaaaatttatcaattaatttaccagtttggattgatgataaaaattgtgataatgatatgttggtaattatatgtttattatgatcgaatgattttaatattgaattgagaactaaattccaatcaatatttgattgtactttagtaattatttgtaacattttagcacctcttgcagttgcttccggtaaattattagcagttaataaaactttttgttcttctgaattattttcattctcttgttgttgagatcctggaagtaaagtttctgttaaaagtaaaataattgaatcatttataccatcctttggatgaattgacattaaatcagctaataatttttcaggagataattttgtatcacaaaattctaaaattatttgtttgaaattcattttttgtaaagattctaagaaaagatcgatttgattattgacaggtacaatatttgtttgataaagattaaatttactaatttcttcttttgatgctgttaatgaagaagtttgctttatattaaagtgtgataataaatctaagtctattggtttattagttttaggacaaatatctgaaatatgagataaaataataaatttttgaggaattgcaaagatttttgaatttaataataaaactaataaataagtaaaatttaaaatatcagtatttttattattattatttggatcgtttaaagatttttgaagtgaatttaatgataagattaaaccttttgaaaatttaatataattatcttgtaaatcttttaataaagaactatatttattttgtaaattattattaaaaataaattgttcagttgaaagtaggattaataaagattgagaatctgtgaaattgaaaaaagataagaatttatcaaatgagaataaagctaattgagattctggatataataaagcttgagatatgtaataagctttttcacaatgttttaaagttagtgtattaaaaatatgaattaaaacttttaaagaagttgagtttgattcagtaaagtttttatggtcaacgatttcagttgataattgattgattaatcttttaatatataatggataaattgatttgtttttttcaaaaattgaatcaatttgctttatagttaaattaaaattatcgttatttaatttagttattaatattgaaatttgggataataaagctctaactaaatcttttgataatggacttgtattagtatcgttattaaatggatctatgattgggaaaagattttgatttaattgagcaggcgaatccgccttattaatgttatttggttgtgataaagtcaaaacgaaatttctttaatatactaattattatattaggtatagtttctatatttcaattagctactttaagtattgagataaagaatggaaaactgataatatagtagctttatagatgatctaagatccgattgttattgatagataaggtaaattaaagataaattaaagataaatacaactatccaacactcgagtagccctttgaaggtgtaacatttcaattttcgctgagcatttgctacgttcatggtgagtgccactataaacttattttttttccagcactgagcttttttgccactctgaggaagatttaatgtgagagagggtctgaatgtggtaattgtagtggttaagttgcgatcgtcttattatgatgtagacgcgtcgaacacaacataaatatttgtcatgggttttcatgattgctatttcaatttgatgcattacgtggttttaatgctgaagaacagttctaagttatttatatatgattattctacaatcaattgtaacacacaatggggattttaaccttatttcaagtattcttactttgtttgttctccgttaatgctataacccaagtcccggaaatttcattagataatttaattacaattgattcattaaatgatttatcgaaaaattggattcctttagatgatacaatttataatgaaggtagaattattttaactcctaaacctaatcatatagcagctaatgaacaaggatttcaattaggttctatttggtcaactagaaatccttcaattaatttacaatcttttacaattgaattcactgctagatcagttggtagttatggtttaacaaatgctggtttatcattattcttagttaatgataatacttttgatattaatgataaatctaattatggtggtccatccaaatttaatggtttacaaatcttattaaattttgatgataaattaggtccaagtattaaaatttatttaaatgatggtcaacagattgatttaaataattatattggtgcttataaatatgaatatcaagcttcaagtattccaatgactcttaaattaggctatgattctaatagtagaactttcaaaattacatgtgataataaattattatttgaaactaatcaaattaatttatcaaatttattatcaaagaataatgttagattaggtatatctggtgaatctaaaaaatcttttgataaacatgaacaatttgagattttaaaattaatttcttatgattcagttactaatgaattaaaagaaactgaagatgaaacattagtagcattacacggtgattatttaactcaacaaaaacctgatatgaatcaatttattcaaagacaacaaaaattaagagaacaattacaaaatcaaaaatccattactgaatcatcaaattcaaattctgattcctcaattaataatgatataattgaacttaaaaatagtattgatatgattatgtcaatattagagaagactgatcaaacagttattcaacaacaaattttccaattatcaaaatcaattgatagagtttcaacaaattttgttaaatttcatgaaaatttccaaaatttaaataataaatataatgaattaagtgatatgttcaaaagacaatttagtttattagataattatgacacaactttaagatcttttgatagagttttacaaactcaattgaaaaatactgataatttagatactaaattatctaaactgtcatcatattattcatcttcagaatcaaataaacttaataataatgatgaatataaaaattcatttgctaatataaaatctttgttatacattattttagttcctgtattagttttgttaggaattgttgcattatgggttcataaattaagaaatgatattaaacatgctaaagtgttgtaaataatatacatacttatagaaggaactacataaatgaaggtttcctacgtctaatattggaaaatccaattgcattaggatttggagttctttttattttaacaatttttgatgaacattcacgttttttatttttgctcttatttaaaagtttattctcaatttcaattaattttgaatcattaatcggtaattccctctctataatatattcattatcttgtataaattctttattatttgaaaatctagtttgatgaattaatgatttatttgattcagtttgttcatgaattgaatgtttaatattatctgcctccgagagattaatattattcttattcttatattcagcaagttcttcatttgttattataatttcatcctctgattccattattttattagctcttttcataagtttaatttgtgtattgataagttcttcaccatatatatcaaataatggttttagatctttatcagtaacctttgtatcatcttcattctctccttcatcagtagtataaacatattcaattaataaatcttcacaatcttgtaatgtatcggataatttatttttatcgaaaaaagcaccagattcagtaatttgattaatgtattgatctcttttcagttgtttttgattatttaaagtaatcaagcttgtgttaattgaatttttttcaatttgtaaatctttcaatttatcaaacttcaatttttcaattagtttataatgactcaaagtttggtaattttcattaacagtattattattgttattattattaatataattaccattcatttgatcataccaatataaatcccattgataatttctaattgttctcttatttgttataaattgattaataattgcttcaccatgtaaatattctatatcatcaattgttttattaagagtatttgaaaaccatgaagtatttgcatttgatgccttaaaatctgattttttaacaatattcatattcctaatttgtttctcaattaattctgctttataatatggtaatccattcattaaatttctttccttaccaccttgtaatattattctatcatcatttgtattaatctttaaattattatctaaatcataattacttattaattttattgaatgtttattcataattggtaatctattcattctagcatttaaaccaccagaactattaacaataacattaccaggtaatgccgatatagttgtaccacgatattcagataatcctgtcaatatattacttgtattattggtattattagaggtattagtatttgaagatagaattgaatcatcatgattaaaagatgtattaccattattttctaatgattcatcttcatgtttaaacccccattgataacttggaattttagataaattatttaataatataccaccattatttacaatacaatgaccaatcaaaatagttgagttttcactatgtttattattctcagtcatgttttcatcaacatctactttattatctaaataatcaaattcattattggcatctgaattatcatacttatttgaattatttattgcatgggttggtaatatcagactttgatatatatcttgataagttgttgaattaagtacggatgatgactctttaagaatgtgtggaagattgtatatgtgagataacctattgagggttttatttaaatgatcatcgttattcatggtgctatctgagactgatttatatacggaattaccttcctaccctgtatcaacaatagcatcagcatttaacagtggtacaaattccattaaaaatattacataagcaacattacataatcaaaggacgatcgacgcgatgtaagaaaaaaaattctttctagtcgttccattttttctggtttttttcattaactttcatcaaatcgtttagtatttcttagggtcataatcaagcactctaggcagggcctactacagtttttaacgaaataaaaaacaaatgtttaacagtatagggatatcccaaaaaatttagattataaaatttaatattaaaaagataatataaaaaaattataaatttgagtttaaaattagtttaaaaataagctgattgaaaaaaatattataagaaaagattaaaaattaaatgaaaatattaataattaacaaacttataataagtagacagcagcacctgcagcagcagctaaacctgcaacacccatgttagctgcaccgttggtgaatgaagattcaacatctggagcagatgatggagctggagcagtagatgatggagcatgagtgatggtacatggacaatcagtaatggttaaagtggttgcttcagtaacagtgtaaactttaccgttttgggtaatttcagttggttctggacagtaagtagtgtaagcagtaacaacttcagtgatagtagtatcagttgagtttgagaatgctgcgacagcggaacctgctaaagctaatggtgctaagtataagaattgcatttttgattgattaagcgagagactattaagaactattcgttgataaaagaagaagaaagaaagatttaagaaaatcaagaagaaaaagataagattagaatatgggggagtttgttaaaaaatgggggagtaggtgtctttttatataattttgacgagagttatagatgaaaatgaggccaaacacacgatgaccaatgaaaacgcggtattgaagttgttgaccctctacaaccggtgggtctttcccaaaacggcaatagataaacatcgcgatgttatttttagaaacagtcaccggacaaaaagaaaagggaaaggaaaaaatcactattaatagtaatttttttcttgttttgatgatgtaattattgtaaataaccactttcttcaagtttctattgggtgtttcactttttctcgctttttcgcatcttttcgcatcttttaattgtttgttttgtttttttatttgtttttttaatagagccgtatgggcggggttcagcatcgtcttatcggcttattgacttctagacgcatcgacctggtatgctttcatacatgtcttcgaggcagaaaaattaccatttacagaattacctctttaggtaatgttatatacaccatgactgaatatcttgttctgtaattgaacaacgactataaaagccaactgtgatgcccactctttagaaacttatcaatcacttttttttccactttattcttcttgttcttgttcttgttgttacattcgttttatttgttttcttatttagtatagattattattcaatttatacatacaatcattactatacattatgactaaagttacagatgcttatcgtcgtcatagatctgtaaaacgtttaaatcgtgcatttatctcatgctattggtacttctcgatcaaatttattagaacttactgaaaatgaagatatttatcttaatttacaaaatgttaatcaattacttacttctttaggtccttatacaaattatgatacttcaagtcatacttatcccgatttaaataataatcaatcaattgatgctaaattgaaagaggaagttcttaataagtatatccttggaaaaatcaaaaccttcaggtgatcttaaattagatttacttaaatcttcagaaattttctttttcaatgatgatgattatactgttccattaaatgatattaaagatgatttcattaataataataatattacttcaaatcttcaaaattcaactcttcatttaaattatgttaaatttaaagcttcacaagtttattgtaaatcaaataaatttcaaatttttgaaacttcaaaattattaaaaaattcaaataatttaaatataattcatttatttgatattcattataatttaagcaaatatccaaaatgtaaacttcataatgctagattaaaatttttaccttattatgattcaaatgttttagttaatttaaattataattcaaattcatcagatgaaaggaaaacttcagttaaatttgaagaatttacaagaaaaaagccttttttcagacaacaaccaccaattctggtttcaccaaagaagagacgtattccacaagaatttaaaccaaatccaaaaccaccaacaaaatcatgtttaagaaagatttagttaataaaaattatcatgcagaaatcagattagcttcctattgtgatgtaattgatattaatcaatttattaaacttttagatgctcaattcaaaaataaagttaaaaagcatagaattcgttcaaaacgtgataaacttaaaatagtttaatcaaactaatatcttatcttatatcaatactaataccaataccttattatattaaaagccaaaaaaacgttctttaatcttttatatatttatacctatcttttatatcttctatataacatagcatgtacttaatttaataaaccatataccatatattttgaaaacctttacgcgtaacatcaactagttcttttcaccaccaaacacaatgactgatcaaatacttaatgaaacagaacagaatgatctatttgaatcactattatccacattaataactaatcatgataatatcaatactgattcaattgatccacgaatctgcacttatacttacagcatgggtaaatagtgaaatcccaacaatttctaaaccattagcattatttgataaaattaatagaaattcaattatttggcaaactattaattcaattgatcataatagttcagtaattgtggaaactgatgatattgattccactgttatatgttctgcttgtggtcatttcaataaagatactgctttacttaatggttgtcaacatgttttacataatcacataaggtctatgcgtcggtagtagtggtatctctttacatcatatacgcatgtatacatccccccattctttactatatactaactaatactaataccatattactaaacactataatcaccctctaacacactaaatactccaactatataccataatcatgaagtatatcctgtaaaaaccaacaccatccagtactataaagtcaaattactaagagtgtgggaaacccaaaaatttaatttttttcacttcaacgcctgtgtgcattgcttaataatcaaacagacttgattatcagattgctttcattagacaatactctacacccttcccaacccacttcaccgtctcctcatttgaaacttttgattgtcaaccttttcacttattaattattaattatgacggttacttcaattgaaaaagatcaaacaataacaccacaggacactgaattattcaattcattccttgaaaagagtaagaactttaaaattgaatcaaagactaaatctggtatctataatcaatcattccctctatattttggtacaactgaagatgaaattaatcctcatagattattagctttccatcagaagagaattgctatcttaaataataatagtaataataataataataaaatagtgagtaaacctttattaaaatctgaacaatctaccaattctccaatctcttcatcaactgattcaactataataactgaaccttcctccatatcttctatctcatcaaatgcaaaggaagattcaatagttgaaaagcaaaaagaccaaccatctgctacttcatcaccaattacaaccaccacacctttgaataaaccaatagtaaaacaatcattaactcctgatcctgttactccagtaagttctccgaagtgtgaaacaatcatcaactttcaagtcagctcctgtaacacctgcatctgctacatcatcagtagcaccaaaactcacatttgctgatatgcttaaaaaaacaaaatctcaacaaaattcaaataattcttcagtatctcattcacgttcacaatctaattcaactacaataaataaaacaaatataaagaattcatcaaatggttcaactacttcaaatttgaaaaaatctgtttatgaaactatatcggataactttaaaacaaatccaaaaaatgcattaccaattacattattaagaataatgtttgattctaaattcataaataaaatatacagcggtgattcacaatcattaatttatcctcatggtttacaaaatagtggtaatatttgttatatgaattcaattttacaatttttattctattgtaatccattttctgaaatgttaaatataattagagaaaatacattcaaagacttagatgataaaaattcaacaactccaatattgaatgctttattagatttacaagatagttttagaataaattcaaatacaaatacaaataactcatcatcatcttcttcttcgtcctcctgaatctgatgcatcctcagaatctccatcacctaatgatataatttgctccacttaaatgtgatattattaatccagataaattttatacacaaataagttcattaccaagattttcacacttaagttggggtcaacaagaagatgctgaagaatttttaaataatttattagatggtttacatgaagaatttatacaatcaattaaaacattatcaagtattgatgtacttgaattttcaaatgctttcagtgataaagatttaagtaggaaaattgttcaaacagtcgatttcataaacgatttggtaaaaaacaattcatcaaattacagataatgatagttggaatgaggttggttcaaatatgaaaactattggtaaaagatcattccaagttaaattatcaccaattgttaatttattcggtggacaatttaagtcagttttgaaaaattcaaataaaaaatcttcaattacattagatccatttatgcaattacaattagatataagtgatattgaaacaaatgatcttcataacagcatttgaaaaattctctcaagatgaagaaatttcattaggttcaacaatggctaaaaagcaaaattttattgataaattaccatctgttttaataatacatttgaaaagattctcatttgttacaaatgatgaacactaattcagaaaataatgaatttgaagtggtgaatagtaagaaaaataaaaagaataataataacaataaacaatttcaaacacattcacaatttaatgatcaatcatctaaatttgatggtagaattgaaaagattcataaatttattaaatataatcataatttaacattaccaaaatcatgtatttcaacaatggtaaatgaagaacctaattataaattattaggtgttgtttatcatcatggtagatcaacagaaaatggacattatacagctgatatgttaacttcaaataatcaatgggttagattagatgatactaatataactagaataagtccaaatgaggcaatagctgatcaaaatgagaaaactaatataaataaaactgcatatattttaatgtatcaaaaagtatagtatcatttaatataccaattgcatttgtgtttttttatccttctcttctaaaacctctataaatattataatagtttttgtaaataatttttaaacctaatatctaatatctaatatctaatatctaataaaaaacacttttcatgcacttatttaaaataggttcgcaaatttcggaaatttcgtgtgtttttcattgttaaaatttttcatgtattgtgtaatccatgttaaaaaaatttactaagttcttaccagaattgctaaagtatttgaaatatcgaataaaatcttttggagaatacatttatctaaacaaaacacataaatcaaaatggatgatttgtttgatgtctttgatgaagtccccaatgttgaggatttaaccaaaacggaaattgttacatcagacaataaaagaaaaattgataatgattcaaattccaaaagtgaagaaacatctaaaaagtctaaaagatttgaatccaagttaattgaaaataaggaagaaaaatcaaaacaaaagaataaagatttagttccagttgttgcagatgatttagaaattgaagcttctcgtgaagttgatgcatctgcaggtttattaccagcaaccgaaggtgataacgttaaatcaactgatttgacaaccaatgactcaaacaattcaaataaagttaaattaaaacatcaagtccgtcatcaagttgctgttccacctaattatgattatgtaccaattggtcaacataaacgtaaagatgaagctcgtacatatccttttacattagatcctttccaagatactgcaatttcatgtattgatagagaagaatctgttttagtttcagctcatacatctgctggtaaaacagttgttgcagaatatgcaattgctcaatcattgaaaaatcatcaaagagttatctatacttcaccaattaaagctttaagtaatcaaaaatatagagaattacaagcagaatttggtgatgttggtttaatgactggtgatgttacaattaatccagatgcgggttgtttagttatgaccactgaaattttaagaagtatgttatatagaggttctgaaattatgagagaagttggttgggttatatttgatgaagttcattatatgagagataaaagtagaggtgttgtttgggaagaaacaattattttactacctgataatgttcatcatgttttcttatctgcaactattccaaatgcaatggaatttgctgaatgggtttgtaaaattcataatcaaccatgtcatattgtttatacagattttagaccaactcctttacaacattatttattcccaactggtggtgaaggtattcatttagtcgttgatgaaaagggaactttcaaagaggaaaatttccaaaaggcaatgtcttcaattagtaatggtatgggagatgatccaaattctattgattcaagaaaaggtggaaaatcttggaaaggtggtgttaaagatggtaaatcagatatttataaaattgttaaaatgatttggattaaaaaatataatcctgttattgttttctccttcagtaaaaaagattgtgaagctttagctatgaaaatgtctaaattagatttcaataccgatgaagaaagagaaatgttgacaaagatttatgataatgctattcaaatgttacctgaagatgatagagaattacctcaaattaagcatatcttaccattattaaagagaggtattggtattcatcattctggtttattaccaatcttaaaggaaattattgaaattttgtttcaagaaggtttcttaaaagttttatttgcaactgaaactttctctattggtttaaatatgcctgctaaaaccgttgttttcacatccgttagaaaatgggatggtgccggattccgttgggtttctggtggtgaatatattcaaatgtcaggtagagctggtcgtagaggtttagatgatcgtggtattgttattatgatgattgatgaaaaaatggaacctcaagttgctaaaggtatggttaagggtgttgctgatagattggattctgctttccatttaggttataatatgattcttaatttattaagagttgaaggtgtctcacctgaatttatgttacaaaattctttcttccatttccaaaatactgtcgcagttccattattgcagaagaaaattgatgaaatgaaggacaagattgatacaattgaaataagtgattatgagcttgttagagaattttatgatttgaaaaaacaagttgaacaattataaagaagattgtaagaaaattattactcatccaagttatatcttaccacatttaaagagtggtagaatgatcaaagtcaaggttaaagatcaatactatggttggggtatagttatcagttatacaaaatttgacgctaaaagattcaatggtactgtcaagtctgtttctgatcatgatagttatattgttaaagttttcgttaatacaatgtttgcatgatgctccagttaaattactcaaaccttttgatcctaatttaccacttggtatcagaccagcagctgaaggtgaagaaagcaataactgaaataattccaataacattaagttcgattgaagaaataagtagttgtagatctattttaccaaaggatttgaacaataaacaagctagaaagacattaaataaggcattaaaagaaattgttaaaagacatccagactggattaccaattctagaccctgttaataaaatgaagatagaagatgaagaatttaaaactattttaaagaaaatctctaattttagaaaccaaggttcaaactaatccattatttaattcaattcaactgaatgaatcttatgaaaaatatgcagaaaaagtttcacttgaagataaaattaaggaaactgaattaaagattgcagcagttcaatcaaatattcaattggatgatttaaaacgtcgtaaaagggttttaagaagattagggtttatatcacaagatgatatagttgatttaaagggtaaagttgcgtgtgagatttcaacaggtgatgaacttttattaactgaattgattttcaatggtatgttcacagaattaacaccatcacaatgtgctgcaattctttcatgttttgttttccaagagagatcaaaggaaacaagaaaaccaaatccagttttaggatgaaccatataaacaattaactgaaatggctagtaaaattgctaaagtatctaaagaagctaaattagatatcactgaaaaagaatatgttgaatcattccgttcggaattaatggatgttgtttaccgttggtgtaatggagcttcttttacagaaatttgtcaaatgactgatgtttatgaaggttcattgattcagaacctttagaagattagaagaattattgaagcaaattgttgatgcagctaagactattggtaacactgaattagagaagaagatgacagattgtgaagctttgattcatagaggtatcattgcagcaaattccttgtatttataatgattgtagatttaataaacagtattatataaaattatgtaagtctaataaaaaaagtttaaatatgttcagttaatggttcctccactgtaatgtatacttgacctctcaaatctttgattttctcctcaataggagtttgaagattacccaatggaacctttgatgcaacaatagcattgagagatgattcaattaattgatgttttaacaaaaacttcattgttgatattagtatttatcacttttgtaattatgtatggacaatcatttaccattttcgaaatcagtatatctgatgatgataaaatgctaaatatttgtaataaatcatcaaatatcaatttatcaaatccaattttctgtaattcactcttatcaaagtaatgtgaggcaatgaatgtatctaaaattaaatgacagaataagtcaattgtcctatgtgaaagcttgaacttttcaaagaaatcggcattcttttctcttaggaagatcgtgttgactcctgttaaaaagaatactgccttttcatagacacaatatttatccattgcataatcaattaaatgatactttgaatcaaactgtgcaaataattcaggaacaacatacgataatcttgttaaacattgaacagttccaaaatcttcgtaatcaatgaatacatcattaccgtcaagtaaagtattttcaccaacaaataatcgactgcaaaaatccaactgtggttccatcttattctttaaaaagtcctaaatcttcattatccttgagtagtaatagcaatcttttccaagtatcaacagaaaacctataaaataataaatcatttgacaatgaaatttcctcctctccaatcaaatacttacttgtatcaagtgttggaacaactggtaatacttcacatattaaatcaattaatcttgattgaactatcttattatgtttcatatcattcattatattggtaatttcataatcgtttaataattttaatctaaatatgtcacttttcataacaattgcaactattgcacgttcagttaaatttactatagcgattggttcatttggatctgccaaaatattaaacaaacatttaaataattgtccatctcgtagaaattcaacgtctccacggatcaataatttaatgataatcagctttaaccttttatcgtgtattgccttcaataataattcttgattaaaaattgaagtaacttgtttgaatgtgtaatacggtaataaaatatctaataagctaataacatattctttacattcacctgtagtttcatttgaattaataatttgtaaaataattggagctaaatgatacaatatttgaacctcattgtgtaatgcagcatcataccttatcttatcttcaaatcttattaataattcttcatctggtgttatagttgaatcggcatataatgaatctaagtgtaatctaaattcttgtaccactggatcagggaaagtcattgataaataaagtagtggcaaattattatgaaacatgcatgaaaaaaaatattccgaataagttctttaaatttctttatcttgtgattttcatcttaaccatggttgatagtattgatgtgttgatcaaaaaggacaacgagtttcgagaatcaagattagattcgttgttcaatgattttagtcatttgaaggaaaaaaattatgatggatatgaatataatatcaaagtttggaaacgtttgatcaataaagcgtttacattatggaaagttattttaatcaattatgatgagatgcttttaaagttcaaatacgatggtcgaattccaaaaggtttatatattgttatcaatgagatgattaatgaaggattgattaatctagaagaagaggagatgtctatttggggaaaagttaaaaaagctgttctaggagttgatgttaccaaaggaacatttgtttacgttcccgttgttaaagagataagtgaaaagttgaaaagtttggtgatcaaggaaaaggaaatcattaatgtcaagtatttacgtaaattaggtgataaagaaggtataacactaaccgattctgaattcaagattgtctatgaatttatgaagaaagaatctgatggagtaatttttgaagataatgtgatgtacctgggtaaaaagggaatgaatggttcagaattagatgactttgctaatttgaactattgtatactggagtttaatgaacaattagagattcagtgaagagaaggatcaaattacaggataagaaaatacgagatctgattaatgaaaagaagatgaatagagctcgtgttgagttaagatacaagaaaatggttgaagagcagatcaaaaagattcttggatagtttagaataatttgaatactatgaaagttactatagagaatgctaagacaactgctaagatgagagagattatgggagagaatggtaaattattgaagacgttaaatgaaaagaatatagatattgatgaggttatggatgatatatacaaagaaattgaacgttcaagtgaaatcggctgggtcggtaagaaggaagatgatgaagaagatgaatgaaattgagattgaacttcaaaagatgattgatgagaaggaagattctagggttaaggaagttgagaataaattgaaaagatctaacgatagcaaagaaatctagtcctgaaaagagtgatgaacaagaacagtgagcacgaattggtagtgaatgaagacattgaagaaagcaacaataaagtcagagagagttcctattctagaatgattgtaccatatgaagggaggcgtgaattgtcttattgttacccctgcttcagtgaatatctttttactcaattgatccatattataactttgagaataaataacttccttaataccgacctgaacaattttaattgaacaagttaaacaagggcatgtattacaatacaaaattgaacctgtttccaccttggatctacctgcttctaataaagcattttcttcagcatgtaagcagagacaagttgataatggaccagactccaaaggatgattacaacgatgaacaaccaccttcattacagtttgtgaaacctcttggagttccattataaccagttgctaagacacgattatctttaacaataacacaaccaactttacgtttcatacaagtttgaacgcattgcagctaaatctgtgaaactcataaaatatgaatcccaatcaggtcttaatctatgaacattgagtaaatctatttttttcaaatttttcaaaagtgaagtttgatttgatgtattatttataagatgaagtttagcattatcagtaaatttaaaagatttagaattaattgaattataataatcatcagtaatttcacaaaattttgaaagtgatgtaatttctgatctttcaaattttgtatgaattgatgaatcaacagttactaataaaacgaatggccttttcatgaaatctgaaaaatcaggtatatgacttgaaatattgtaaataaccatattatctaaccaatttgttgtaatataatctaataaagtagtagcatcattaaattcatacttgttagatggtgtagaatccacatatgataaaagcgtaaaattgaaatcagaacataaagtatctgcaatattgctaacaccactacctggtgcaccttccaaagctactaacatctatgtatgatgtattgatatgatagaatataaccttaataagtttagttaaaagattggcatttgaataccaatataaaaacttggagatacttttttgagattccatgtacacggattttggtgttttcaatagatgttgtttcttttaatcaatggacgatttttacattgctagagaggttgtgaagtacggaggtgatatacagaggggtaaggatggacaaatctttatacaagtgagcaatgggtttgttgttttgaaaccggatgttaattttaatggtaatagtactaatattaatgacttgtttacctgttaccgtataaaatttggagatgaagaatttattaattttttccgtaatattataagagatggacctgtaggtattgatagtggagttgagaagaatggagatgttaaatatttgaatatatcagagagtggtgttagtaaaagttatgattgtatgtatttaagtgtttgtgataattggaatggatatttaatgaacaacaaagatggtaaatttgaaacaattacatgtattaatgaagtattagcaagagatcttggaattgttatgaagggatttttaaatgaaggagaagataattgtgttaggatcgaatatttaatgtggtttaaaggtgcagatttccaagtattgaaaaaatggaatgcagttcatcgtagttttgtatgtttaacaagaggtggtgttttcatctatgaatatgaaagtgagagtggtgaattaagtaagaagattaaagttgatattggaatcaatacttatctcattcgttgtgaacaaggtaaatggatctttgaagatgatgggaaatggagtgttgaaatttatttgttaagtgccgataatacgataatagtgaagaaatgttggtataaggatggtcaatggggtttctatgatggagaggtagttttaagtgatgaagatgattatattgtaagttatcaagtgatgaaagggtatggaatagttgttatttatactggaagcgttattgtttataccaatggagaagttttgaaaacgaatttgaatgcattagtagcaatggataatttagtgagtatatttgatgaagcaaagaatgtatggtatgttattgcatgtaataaagttggtaatatgaaatttattgttttgaatagtaataagattatatatgataaggagttcaattatattacagaggaaataaatgatgaagaatttaagaaatggagtaatcgtttaccattatttagtaaattagaatcacagagtgataattattgtattgatacattaagagttgatttttcaggtagaatgatttatatgttaagtcttgagaatcataataatagagattttgaatttaatacaggtagaagtatcgcacgtgagagagctacaatgaaattttctatattaaaatcaagtaatgatgttaaagtacattatgaggatgttaatgaatttaatagtttaagtagtggaggaggatcatattggcaaaatgttagaaatcttcaattaggattgcaaatggaatgtacatatgaagagatgaataagattaagagtgaaagtgatgaattatttggagatgaaggtagagagagaagaagagttagtggagttattacacaaaaattaataattgatgaaattgaacaattattagagaaaaagcgtaaaacaattgaagttattaaacctgttgatttattagttgttacaggtgaaaaggttaaattacccatttgtggagggttattacatgaagaatttattggtaaacctaatgaggaaggtatatggacatcaattggaggtagaaattggaaatcatgttctattacgaaagctccaattttaggtaaaacacgtaaatgtggactatgtaaaagtgaagttatagcagatagtgaaagtgaaagtggtgaagccggtattacatctatcactagagcatgtccagtgtgtcccttctgttctacaagatgggttgtatagtaagtgtatagtatagtatagtaaataagacaagacgatgcgtcgatgcactgtaaagagcaggaaaaggcgaaaataatcctcaccacatgcataaataaaatcagagagtggaacatcaacagtgtctgtatatcggtggagagatatataggaggtttgttgagcatttgaatatttgatattttgtatatctctttggatcagtggatatacctctctcttttcatttactatcacatacatactcttatatactcctctctgtcaatggatatctacgatttaaatgactctgcaacgaaacgtacacgtgcatcgggggaaatacttaactatttagttcatgaatttgctaaaaatgcaaatccttcaactgctttacgtcgtgaaatttcaaataaaactggtatgcctgaacgttcagttagaatatggtttcaaaatagacgtgcaaaagctcgtaaattggaaaaattaaatcaaaatcatccaaatttgatatctgatacaaatttacaacaaaataatcataatcttaataatcaatccccattacaacaacaatcttcctcttcaatgcaactacaaaatagtttaagtccaagtccaagattaagtctaaataatcttgaaactataaatgaaattaatggtaaatattatgttattgaatgtaaaacattatcagttgggaattggcagagaattaaatctggttatttaaaatctcattcattacctcaattaactaatttatctccaaaattattaaatgaagttatggatacaactgatttattagttgtattatcgaaaaaggataaagaattaaattatttcttttcaggtgtttttcaaaatgaaaaagtcttatttagaatattttatccaattttcaatataattaaatcttcaatattaaataaaactcaaaatccaaattctccatcagattcatcatctgatgatactttacttcaattagaacttacaacttcaccacaatttgcagttcatttcgcaagagatccatcatcaggtaatgaaaatcttaatcaatggtcaatttgtgaagattttagtgaaggtcaacaagttgcaaatgcatttcatggtaaaggtggtaataatatacctcatatattatctgataatattaataatttaaaaattttaagtacattaataaattcattaaataaatctcataagacaacatcttcaactttccctgatccaatttcttcaactgattctcatataattaatacttcaataactccaaatttaacaccaattacaaattttcaattacttgatcaaatttcaaatacttcattaatacccacaccttcatatagtaatcaacttaataataataatactactaataatggtatcagtaatggtataaataacaatcataacaataataacagcaataacaacaataataattaccatcatcatcaaatacagcataatcaactattacagtctaatggaacaccaaattcatcaacaacaatacagccgtcacattcatcacaacttacaatatttgaaatataattcagcagattctacaccaatagattttgttagtgctggagtgctaaataatgataatgaggatgataataatagtaatgaggatgaagaggataataataataatgatgatgatgatacagataattcataatgataaaaaaatgagtaatctaatagatttagatatggcattagaattagatgataattctaacagtaataataatacgaatacaaatttagatattttcaaaagtaaagatcctaaagataataaaattgatattaatggaaataatgtaaatggtaataatgagaatgatgacgatgatgatgatgatgatgataaggataataataataatatcattgataattataaggatattaacaatgatttaattggtatgcatattttaaattctaatatgaatatgaatatgaacatgaacatggatatgaatatggataatatgactatgcataatatgaatatgaacatggatatgaacatggacaatatgaatatgaatattcgaagatatgaatgatatggaaattaatttacatcataaaaaggaagttgatttaaataatatacatgatattcataataatttaataggtgaacttaatggtaattcactgatggatgaatcattcttcattcaatgatgatgaaattaattttatgtaataattagtatgtagtttaaaaaatgtgtaactttttcatatcgcgttaaagttcaaagtacatttctgaagacggcatgaatttcgtgtttgtttcttttgaaagaagcaatggtcaaggctgagaaacgtacgttacaagaggaagacagggtgtcaaagagaagacatttggaagaggaagataaagaagttagtgaagaaataagtgaagaaggagaggaagaagggaggaagaagggaggaagaggatgaggaggaggaagaagaagagaaggaagtgaagaagatgaagatgaagaagataatacatttggtaagaaacaacttaatgaagatgaacaattcaaattatctgataaatatcgtaaacttaaagataaacttgagaatcagagatctaaattaacaacagatgaaggtattggaatagttactgaacaacttacaattgctgaaaatttatttaaagatactaaaacatcatcaaatactgttataattgcaacagattctgcaacattaagagaaattggtgaacaagcaaaaattgcaactaaaaatgttaaatttggtaaaagtgataaaactattaatttccaattatttacaaattctttcttaaaatgttttacaaatataacgaatgatgaagagaaaaattttcaatgaatttgataaaattcctgaatataattggtcaaatgcaggattattatttaattcaattagtaaaaatgttcaaggttcagattttttacttggtccattagttattactaaaaagaagaaaattatacgtcaaagattaattgatgattctaaaaaaaataatgttattaagacagctgatttaaaatctgctaatgaagttattaataaagatgttaaagatgatacatcaaaattagctgaaaaattatttaaaaggttaaaagaatatggtaaaccaatttcaatttttgaagttattttaaatcctttatcatttggtaaatcaattgaaacattatttattacaagttttttaattaataatggtatgttagttttagataaatttgaaaatggtataccatttttacaacttgcaaataatgaaagtattaaaaatcatttaagatttcaaaataatgatgatagtaaatctcatattgttttcaatttagatcaagaaacttggtcaaaattaattaaagaatataaaattcgaacaacctttctttactatataacaagagtctatatattatatctatatatctatatattatgctttttccaaccttctaatttaagtaattcagttattggccatttacgtataacagttgtagctaaatctgtagttaaaccattttcatataattcaatacctgcccaaccaatcattgttgcattatcagtacataaatttaattcaggataatggaaagttttcaatacctaaaggttttaattgatcaattagcatttgacgtaaatacatattagatgaaacaccacctgaacaaacaaaatcatttattttaatattgtcatcattactatttttttcaattgctaatttaattttacttattagatgttggaaaattgtcttttggaaattaaataataatcttgctctaattttatcatcattcggtatttcattattataaaattttttcaaagtattcttaacttgtgaattaaatgaagcaaatgaatattgtaaaatatctttacgatcccattgatttaacattggttccttaaccattatatcaactttttcattccattgatctctaaatttattaagaaaaatttctgattctttaccaatcatattaccagtaatacctaattctctaccacatttatctaaggcatcaccagcggcaatatcaattgtatcaactaaaatttcatgattaaataaacttgtacttaaaacgaacattgtatgaccaccacttactaataaactataaaatgggaaatttggattaccaccatttgaattcattctactaattaataaatgacctaacatatgattaacaccaacaattggtatttgccaagcaattgataaacctaatgctaattgataaccaccagataatgaaccaatcattccaggacctctagttgcacaaattaaatcaggtttaatattagtagtattccaattattatcattaagtatttgattaactaataatgaaatattctttctattatgaattgcagcatcagttggtacaacaccaccagaaagttttgaatttaaagttaatttcctttcatctattaatttaggaggtttattaggtgaatatctatcaataagagatacacatgcatcatcacaggaagtttctatagctaatactctataacaacgtgtagatattcgaaacaactgcattgtttaaaagtatatttagtggtaatggtattggaatattgaaaataacattttcctcggtagtaaaggaatggttttatgatgataactcttcttttcttttaatattagataaagaaacagacacagacacatacaatatggatactactggaatggatattgagaaagttaaaaataaggcgattgcattttatgaaaaggaacatgaattaaataaggaagatagattacaattatatgtatttttcgaacaacaaacacgtagaatgttattaggatttgcaattggagttacgattggatcaatgacaccatttttagttcgacgtaaaggacaattaattaatccagcattaccaatattaggagcaattttaggtggtagtattataccaggattaattaatcaacaaatttataaattacaagttaagtcaatttaaagaaaaatttggagataatagtaaaatttgtcaaatgattgaatatacaccagatccaattagtaaaagtattttttggtctaattatttcaaaaagtcagctaatgatataagatatagaatgaaagatccaagggaagttgaaggtagtaataaatttttccaaattgaagatagtagtggtggtagtggtagtggtagtgtaccaccatatggtagaccggagttttatactaatgaagagagtgaagataatgatagtgataagtaatggtagtagttgggataatattagaaaaggtaaggttatttctaatactaattactactacatcaatcaacatttacagatacagatagtatatcaccaagagagatagtaataaagatagagatagtaatagaagagagacagcatgggagagaataagaagggagaataatcaatagagggaaataaatttgtttttcaagcgcgtattcttatttctatttctattatactcttctcttctttctttaaggatatagtataagacataatggacatttcaaggtattttgataacaacagtggtaaatcttatagtcatttcaaagaattagagagtaacttatcacccaatgataggattaaattacatgaattctttgatgattcctataaatctatcacattagcgaaatcttgtgttggtatatctgctggtttaactgctgtctatttctctcgtcgtaaaaggttaatatctccaacttgggctttatttgctgcattatcaatttcaactattgtattccaatcaatgccttcttcaattcattccattagaagaaataagatattaaatgataatgataatgataatgataatgataatgataataaattattaaatattattgattcaataccaaatccgggtgacggtgcttatttttgggcaaaatatttttcttaaattcatgacatgtgtatatttatcctggataacatgattttctatctaattttatttaaatacttctttatttctttatttattataatctcttatgacacactcccttcttagaacaaacaaatgttcagttcatctttcagacaatctctaaagaatacactctttaagagaatctgcaacttcatcttcatcttcatcttcgaaatctattattcattcttcaattttaccattaccaaaatcttctcttttaattgcttgtgctttaggtttaggtatttattcattagatgcaagatctgcaattaatgaatatgtttattgtcctcttattagatttttcacaactgctgaacaaggtcatatattaggtattcattgtcttaaggcaggtctttatccaagacttttctctgattttgatgataaaattttaaatgttaatgttttcggtaaaattttatcaaatccaattggtatggcagcaggttttgataaacatggtgaagtaattgatcctttatttaatttaggttttggttatgttgaaattggttcaattactcctgaacctcaacctggtaatcctgctccaagatttttcagattatctgctgatgatgctgttattaatagatatggttttaattcatgttggtcatttggaagttttagctcgtttaaaatatagatttaataatttaattaataaaaatccaaatgctgaattaaattctttccaaaacgataaatttttagcaattaatttaggtaaaaataaaactggtgatgaaattaatgattatcttaaaggtgttcaaaattttggcccttatgctgatgctttagttattaatgtttcttctccaaatactccaggtttaagagatttacaaaatgaatcaaaattaactaatttattaactaaagttgttaatgaaagaaataatcttaatggtgaattaattaatccaaatattaaacctccaatcttagttaaaattgctcctgatttaactgaacctgaaattgcttcaattgcaaaatctgctaaagatgctaaaattgatggtattatcctctcaaatacaacaattcaaagaccaattgataaattaattactaaaggtgatatagttaatgaaaatggtggattatctggtaaacctcttaaaccaattgctcttaaagcttttaaattattaagaaaatatactaaagattcaaatttagtacttgttggttgtggtggtattagtaatggtaaagatgcaattgaatttgcaaaagcaggtgcaacttttgttcaattatatacagcttttgcttatcaaggtcctggtttagctagaaaaattaaagatgaaattacatctgaattaaagaaagaaggtaaaacttggatggaaattgttggttctgatgataaatagtgaacatttttaagtaaaaaaaacttataacttatttaaataaacgaaaactagaatatataaacaaaaatcatgataaaaacttcgtgcaactgcatatccattaataattgaattaatttgtccaaatgatgttatatcaaatgacattatagtattatttgggaaaattccattaatacaacaaattaattgtataataccaaataaaatttctaaaattaaaaatttattccaactaggaaatacttttaaaaaattcattcttaatcatcattgtagaaaattataataaatctaataataacatatgttgattgataaaatttactctttaaaatatcatattcactcttattattattaccaaaattcataccattcatatctcctcctcctaatccactcattcctttcatattttccatatttttaaacattgtagcaaatggatcatcaatcggtttattatgattatgaccaatatgattttcatcattactactatttaataacattttatttaatgctttctcgatttcatcatttgaaataaattcatttaatggtgaatcactctctaatgattcatcacctaatcctgaaactggtggatcatcatattcaatagtatcttcaatttcaattttattatcttttaatatagtacttattctattattaactttgttattattacttttagtttcatttttttcaatacccgttgttgtatttattaggtgtattattaacactatcagtacctaaaatcttattgattctatcaccaccctgtgataatttagctgctctcttctcacgcaacagtcttctcttctcagcggcacttaattcactcatactgttctaatggaaagtaaagacttattatatagtaaataatctttaagaattaaatttcatgttgccaatttgaaattttgaaataccgctccatgaaagtaattgcatgttttctgtatattagcaactgactgactgaatgaacttttcttttgagcaatggaaaaccaaggtgataaacacaccaataatggtgatgttttcaactattaataaggatactaagaatgataatgattcaatgaagaaaaggtatgatgaattaaggaaactttacgttcctgcaactccgtttaggaaatttatttatgatttaatactttgggcattttgtgttgttttcgattgtttctttcgtgatatacgttcaaggggtggatttaaagtaccaaaggaagatcccgttatttttgttgcagctcctcatgcaaatcaatttgttgatccaattattttaatgagtcaagttaaaaaagcttcaaatcgtagagttcattgtcttattgctgaaaaatctcatagaagaaaatttattggtttagtttcaagaagtcaactggcaatacctgttaaaagagctcaagataatttgaaaaataaaaatggttcaattagattagatccaaataatgaattacatataattggtgaaaatactaattttttaaaagactgtgaatcaaaggggttaatagcattaccaaattctttaggtactgctgttattgaaaatgttatatctgacactgaattatttttgaaaaaaccttttaaatattcttctaaaaatgcagaattaaaggctaaagaattatttaaaactggtgcaaattttaaatcagctgaaaaaattgatcaatctgaagtttatgcacaagtttttcgaacatttatctcaaggtaattgtattggtgttttcagtgaaggtggttcacatgatagaccaggcttattaccattaaaggcaggtgttgcattaatggcattaggtgcaatggatgcaactcccggtttaaatgttaaaattgtacctgttggtatgaattattttcatgctcataaatttagatcaagagcattagttgaatttggtcatccaattgaaattgatgaaaaattactttcactttattcaaattcaaattcaacaagtgaagcagttaaaattttattagaaaaaattacaaaaggtgttgaatcagttactttatcatgtccagattttgaaagtttatcagtaattcaagcagctcgtagattatattcaaataattttagtcaaaaattatcaactggttcaattgttgaaatgaatagaagattattaaatggttatttacattttaaggatgatccaaaaattaaaaatttaagtaatgaaattttacattataatgaattattgaaaattaataatatacctgatcatttagttggtaatataattgaaaaatctaaaatttcacttttatttgaattaattattgcaagtattaaaatattctttttaacattattagcattaccaggtattttcctattttcaccagttttcattgcaacaaagaaaattagtgaaaaaaagagaagagaagcattagctggttcaactgttaaaatcaagggtaatgatgttattgcaacttggaaaattttagttagtatgggatttgcaccaattttatatacaatttattcaattattggtattaaatttattcattactataatccaaatatttcaagaattttatcatttattatattttatatgatatcagttacaattacttattgtgcattaattttcggtgataaaggtatggatttatataaacaagcgaaatcattatggttattaataacaaataagagaactgttgaagatttgaaaaataagagggataaattatcacttgaaattactgaaactattaatttctttggaccaaaattatatcctgattttaatattattgattatgataagaaagtcaaagactaaacaattattaaagaaacaaagaatgaagaatcaaatcaatttaactggattaactgaagaagaagaattagaagaattgaaagacattcgaattaagacaacgtagattaaagaaaaaacaagagagatctaacaagaataacatgaataataatagcaatattgatactaaatttcaaatgactcaagatactccaattcttaatgcatctgatgatatgtcatcaagtactgaatcttcatcaatttcaattactagtgatggagaatctgttacatctgattctgaatataattctaatagtagtaaatcacaaatgatggatatgatacgagagaaaattattaaagaaaatagagaaagagaagcataggcatgtgttttttgttgttgtatagatattaatatagattataatatataatatataattttttttgtataaataaatattattccattctttaaaaagaactccaatcccaatcaacgggtattgaaccatcattattatttctatcattatcattattatcattattatttgatttatttaaatctttaccattagtaccaagattatgatctctagttgtatgatccagcacaaactcttcatatttttggaaacatttatgacaaactttacacaaaaatttattatcatcaattgtaattattttatcatcccatgaattaccaaataatgtaaattttgcattattatcaagataaatataattatttaaacaatcaccacaaaaaatttcaccacatgaacgacaatgatgtttccttctcttatttgttaaataattaaataatctaccacattgtgaacatgtgaatcttgaagaatcaggtacccaatgatcagtacttggaccttcataatcaattggtgtatttgatgatgatttattacctgttaaataattccaataataatcaacaattgaagaagcagttgatctaatacttgaagatgatgtgttattgttgttattgttattgagatttttcttatttgatggtattctatgtggatcaaaataacaatctgaatctaaattattatttttaacaactcttaaaactgctggtgtatataatggtctctgttgatcattaatttgtttaatattaggattttgtaaatctctaaatggtgaattacttctctttggaggtgagaaagccatatgagctgatggtgatgttgctctgtattgatcatttaggggatataccgatggtggtatttgtctattgttggtattattatttatactcatactattattattgttgttgttgttgttgttgttgttattattattatttatcgatatcactctattactaaactgtaccttactattgttgttgtgtatattttgtaaattattctttgtattattttgtaaattattttgtaaattattttgcatattgataccattaccattattacttatattattactcatattattaccattattaatattacccatatgatgattaactctactgggtactgttttaacagtacgtggactcataggtgatatactcttaactgaaggtgttggatcccttgcatggattcttcggaaatgttccattttactttgttctaatttctcttcaaatatagctctctgagctgatgttgtatcatttgataaagtattattactgttacccctctggggtttcaaatccaacccatcattgtcctccatagtagcagtatctatagcaaattgtagtataaaataccaataacagtaatagtaacttctccaatgtcatgaattcatgtattcactatgcgaagtgaaaaacttgaattttcagtgagaaagaagaccatgtgtctttttcaaattaaattactatacatttatcgtgtctttcttcctgagtttcctattggcaatggctgtttcatttgataaggaagggtatctacgtgtcgatgcttcagtattggctacattacgtctattggtgattacatcaattgcaatctcattatcaattgcagcaattggttcaagattattctcagttatacgttttgaatcaattattcatgaatttgacccttggtttaattttagagcaactaaatatttagttaatcatactttctataaatttcttaattggtttgatgataaaacttggtatccattaggtagaattactggtggtacactttatcctggtttaatggttacttcagctgttatttctaatttattaaataaattatcattaccagttgatattagaaatataactgttatgttagctcctgcattttcaacattaactgcattatcaacttatcttttcacttatgaagttacttcatcaactaaaacttttaaaaataataaaactcctgctttattaagtgctgcatttattgcaattgtaccaggttatatttcaagatcagttgcaggttcctatgataatgaagcaattgcaattactttattaatgacaactttctatttttggattaaatcagttaaattaggttcaattttttatgcatcaattacttcattattttatttttatatggtttcagcttggggtggttacgttttcattacaaatatgattccattacatatttttgttttaattttaatgggtagatttgattataaattatatacaagttattgtacttggtatgcattaggtactttaatgtcaatgcaaattccatttgttagattttcaccaattaaatcaaatgatcatatttcatcatttggagttttcggtttattacaattagttatatttgcaaattatttcaaaactattttatcaccaaaacttttcaataattttatgattgcatttggtacaattattttatcattaggtttaattttcttaatttttgcaacaaaatttggttggattgcaccatggactggtagattttattcactttgggatactaattatgcaaaagttcatataccaattattgcatcagtttcagaacatcaaccaactccttggtcatcattttattttgatttaaattatttaatttggtgtttcccatttggtgtttatctttgttttaatgatttatcaaatgaatcaattttcgttataatttattcagttttaggatcatattttgcaggtgttatgattcgtttaatgttaacattagcaccaattgtttgtgtttgtggtagtttaacaattggtaaattaattcaaatttatttagatattaaattatatttaaaggaaaaaaatgaaaagaaggaagataataataataaagaaaatattaccaatttatccaatttaatttcaaaattattaattattttaacaatgatattttatttattcttttatgttcaacattgtatttgggttaattctaatgcatattcatcaccatcagttgttttagcaagtaaaaatagggatggatcagctgcaattattgatgattttagagaagcatattattggttacgtatgaatacagaggaagatagtaaagttatggcatggtgggattatggatatcaaattggaggtatggcagatagaacaacatttgttgataataatacatggaataatacacatattgcaacagttggtaaggcaatgtcagttaatgaaactaatagtgaaattgttatgagaaaattaggtgttgattatgtattagttatatttggaggattattaggatatagtggagatgatttaaataaatttttatggatgattcgtataagtgaaggtatttggcctgaagaagttaatgaaagatcatttttcactgataagggagaatatagaattgatgaattagcaactgattcaatgaaagattcattaatgtataaaatgtcatattataaatttggagaaatgtttcaaaatagggatccagttgatagagttagacaacaaagattaagttctaaatatgcaaatgaaattcatttagatattttagaggaagtatttacaagtgaaaattggcttgtacgtatttataaattaaaggaagaagataattttggtagatcattagttgaaattggagataaggaaagatcagaggagggtaagagtaaacgttcaaagagattacagaccaagaagaggccaaaccttgacttacgtgtataagagagtgtataagagagtgtataagagagtgttaaatttccgatatattttgaaaattgaaatttgaaaattgcgatgaaatttcttaaaaaaaaaattttttttaaattgaactttttcatcacatgaaattattatagcttttaagtctattagatatttcttttggcaaaaagacaattaaaataatgaaatacgttgtagtttcaggtggtgttatctcaggtattggtaaaggtgttcttgcatcatccactgggttattattgaaaactttaggtttaagagttacatcaattaaaattgatccttatttaaatattgatgcaggtacaatgtcaccattagaacatggtgaatgttttgttcttgatgatggtggtgaagttgatttagatttaggtaattatgaaagatatttaggtatttcattaacaagagatcataatattacaactggtaaaatttattcatcagttattgaaagagagagaaagggtgattatttaggtaaaactgttcaagttgttcctcatattacaaatgcaattcaagaatggattgaaagagtttctaaaattccagttgataattctggtaaagaacctgatgtttgtataattgaattaggtggtacagttggtgatattgaaagtgcaccatttgttgaagctttaagacaatttcaatttagagttggtcatgaaaattttgctttgattcatgtttctttagtacctgttattcatggtgaacaaaaaactaaaccaactcaagctgcaattaaagatttaagaagtttaggtttaacacctgatatgattggatgtagatgttcaaattcattagatttaccaacaattgaaaaaattgcaatgttttgtcatgttggacctgaacaagttttagcaattaaagatgttaattcaacttatcatgttccattattattaagagaacaaaaaatgattaattatttaactaaaagattaaaattaaatgatttaataattaatattgaaatgaagaataaaggtattgaattatttaataaatggaatttattaacaaataaacatgatttatcatttgaaaaagttacaattgcaattgttggtaaatatactaatttacatgattcatatttatcggttattaaatcattagaacattctgcaatgaaatgtggtaaaagattagaaattttatgggttgaatcatcagatttagaacctgaaactgaattaattaataaatcaaatttccattctgcatggcaattagtttgtaaagctgatggtattttagttccaggtggtttcggttcaagaggtattgaaggtatgatttctgcatcaaaatgggcaagagagaataaagtaccatatttaggtgtttgtttaggattacaagttgcagtaattgattttgttagaaatgttttaggtaatcaaaatgcatcatcaattgaatttaattcagaattaaatgaagaagatcaagcagttgtttatatgccagaaattgatcgagaaaaattaggtggtacaatgagattaggtttaagaccaacagttttccaagaaggtagtgaaaatactgtaattagaaaattatatggagattcaattgaagttttcgaaagacatagacatagatatgaagttaatccaaaattagttgaaaaaattgaagagaaaggattaaaatttgttggtagggatgaaaatggtgaaagaatggaaatatttgaattagaaaatcatccatttttcgttgcaactcaatatcatcctgaatatatttcaaaagttttagatccttcaagaccatttttaggattaattgcagctgcaagtggtacattagatgatattttaaaattagatttaaagcaaagttctaatgatttttaattaacatgtatagttaagaaattttaaataataaataataagataaataaatataaaatattataaatttaaaatatattataaattcaattatttaccaagtttaataacatttgaaaggaaaatacctgataataaaggaattgttaaattatcatcaataccaattatatcaattgcttcacttaaagaagctataaaacctgataataaggataaagttaataaattaatttgattatttaaaggattatattcaaaatctattgaatattgaggaaattttggtacaattataccataaaataaataacaagagaacataccagtaatgaatgcagccattgaaccaattaaagattttgaatttgaaattttaggacttaaataaccaaaatttctaccaattgttgaagcagcggtatctgaccaacttaaaagtaaaattgacattatactaacatcttgcttttggaaaataaaagttaaaattaaaccaatttgaaaataaataacaccattaattgaattaatttctctttctctcattaagaaaccaactgttaaacaataaagatgattaaaataaggccaattaaatcttaataaatctaatgagaaaatgattataacagctaataaatttgattgccaaacatttttagttttataaccatttatatgtaaataaattgttaaaaatccaattgaaatatgaaataatttacgtggtaattcatgtttatgaataattgaataaaaatgagatggtaaagttggagaatctgaaattggatcatttttaatggtatcattagtaatattatttagtgattgattatcattttgtaaatcttttaataaatctttattatcatctagatcagaatcaatgtcagattcaatatcatcatcatcatcatcatcatttaatacagtagttgtatttgataaagtataatccggatcaagagattcatcataagaatcatctaccattctacggatggggcgagtctcattagaataagacattgcagatggtaaatgaatactaaattaaatcaaatcaaatcaaatgaaaatcaaatcatcaaatcattaaccattaatcaaatcaaataaaatcaaaaaaataataattttagttgagagattatcatgtgaattttaaaatacagtaagtattacgtaatgttaatttaattatgtaatggtcacgtgatattgtatatttaatatagacgcgtctgttctccttgtgtgattacgtaataagtaatatcattataacttataatatacacttaataactaactaataactactaataactactaacaacttaaaactttacatatttcactccattcaactgatctctcaactggtccatcctctttaatactattattactactatgattacttactttaatatcaccactgtatattatatcccctttattattatcaactgtaataaatttaactttctcaattgttttactctctaatcctctacctcttaaggtttcctcagttctacccttaacacctgtaattataccattcttatttatattaactggtaatatattcattaaatcatttcttttattattattattattattattattattatctagtattatatctttattcatagtataacttacttacttaaagaagaaagaaaattatcgtatactataaatcttaaatctttaataataataatacgtgaaaaattaatctctactcaaagtctttttgttaacttagctgcctattctatatagtctttttatatagagtatccgaactcagtgtacattttaaaagatttacagtctcgatagctcaaaatgaatatatatgtcggatttatcaccaattcaggaaataattaaaactcaaaaggaagtaaatgctgagatagcttcctgaggtacatatatatatatatacgaatgtactcttttaccattcaagaaaaaaatggaaaaatttgttattctgcacaaacaaacaagttggtacggattttggtcaaattgatactattatggcaacagcagtcgaattattcttctctagaaacctaatgagaagtactccaaatggtttatcatttcttatgaaaatgaaccaaaaatgggcaaatatctctgcagaagataattcaattctaattaataaagtcctgaataagaagtcatcagttgaatatcacgttcagttagactatggcaaagatagttattatattttaacccaaccatgtgcaactatggtttttggaattattatgaacacatttcaaaaaaatgccattaacaaatggacaggatgcctagagagtctaaacgtctcagagaaaacgtcaatgaagatgagatatttactgccatagatgaactagatgagattgatcaaaagactatacaatataaattattaagtgaaaaactcttcacttaaaactgttagctacttcactattcgctaactctcaatacttcacaaagtctactctaaagtctactcttaaagactctaagatcaatacttccttcctctttttaagtcacaccccatacacccaaatgtttaataaatatcctccacttatatctcattggattgatcctattgccgctattacaatgggtgtatctgcttattatttatatgaaaaacgtattaatcgtcctcataatcatacttttaaccaattatttaaaagaagattcttatcttagtcttatataatataataatacctatatatacattacactttaataccaacaatttcattattctctctaatacatgcaacttttttatccttctctaatttttctaatactttataaataatttcatcatcaataccataaaattcttcatttggccaattattttgaatttcataaactgttaaaatactaccattttgtccacttttattaatccattcaattaattttaaactccattcatttatatttttccaataaattaatatatttttaaaatctcccttattaatatatttacaatactctaatttaatcatttcatttataatatcttgtaataaattatcatttattttacgttcaatttttttattattgaaaatttcttgataatttccattactttcatttaattcaagtttccaaatatgtttaaattcacagtattttaaaattatattaatccattgttctatttgtgccttatatgtaccttcatgtggttgtttagtataaaatggtgggaaatcatgtattttaggaaatttaaactccatattgataaaaagagggtgttgtgtaaaaaaaatagattaccataacctaatacatccctcgtcttttattacaattccttttatttactaatggaaaaagcattacttgataaactacgttatcaaacaaatttaaaatataaaaattatacaaatgatcaattagataatataattaatgaaaaacttgaaaaattaggtttaaatattaattcatttaatgatttatcttcattacaaaatactttattaaatttaattaatattagaaattcattaaattcaggtatatcattatcaacagaagatgataataatattgataatgaaatcattactccaataatagataatgttaatcatatcaatataccatcaccaaatccaataattataaattcattacctgataagttaatttcaaaaaatttaatgttatcacaatttataattgatttaattaattcaattaatgtaactaatgtttctgatgataatcaacttttacaaattttattagattgtaataattatctactatataacaaggaataaaatgtatataataatttgtactatataaaataaggaatatctaactttaactctccatatttgagaaaactcttgaattaataactttccaatcaatacaatcccataaattttctaaatattctcccttacctgaaactccataatctaataaatatgaatgttcccaaacattaatacataataatggtaatgaataatcttttacaccattcttaattttttcaccatatttttcaatatttgcatattcttgataatcaaatgttgtattaagatcaatactttgatttttaccataaaaatatggtgtaccatcattattacatttaacaatttttaattctttattctcattttcaatcaaaaatatccatccatttccacttaaaatatctgcttcaccaagaattgtatttttaaaattttctaatgaaataaaagtatttttaatattattaagtaattgtggtttaataatattttcaatattattaattgaatcatccttattctttaattgttgataaaataaatgattattatgagcttgtgatgcataatggaaaatatcagcttcttgatttttctttgaacaactcattgcaattgccattggtgatctattctcatatgttgtatcaacagttttcatacttaattgttttgtaagaaaatcttgatattcaatccaacctaaacgaaattgttctggactcattaatcctttaataccattttgtgtaaatgatttctcaagtgctaatcttggtgctaaatggatacctctagtaaataaacgactcattgcctaaaagaaggtgtgatataaattgttaattcaacgaattaataaattcatgttgaaaaatttgaaaaaattcatgttatgaacataataagatttcgctatataataaagcattaattctctactgcagtggcctctttaatcaccagatttaataaaatgcgtagatttacaacaacttcaattaacaatgcacgtcgatctctgtatagaatacaacctaatcaattaaatcctattaatccgattaatccgataattgaaacttcaattaatgataaaaattcaattattaaaaattatcacccagttagtaatattttaagaaattcaacattaataattgaaagaaagattgaatatatgaatttattcctgggatttgaacaatcaaataaatatgcagtttataatgaaagtggacaacaaattgcttggttaattgaaagagattttggattttggaaattaattttaagacaaatttataaattacatagaccttttaaagttgatttaattgatcttgaaggtaatttattaatgacaattgatagaccttttagttttataaattctcatattaaaagttatttacctgatatggaaacaatgattggtgaaagtgttcaaagttggcatttatggcgtagaaggtataatttatttaaattagataataataataataatgaatatgaagataatgaactaattcaatttgctaaaattgattcagaatttttaagatgggaattcccattatatgataaaaatgggttaattacaggtgaagttagtagaaattttggtggtttatttagggaagcattaactgatactggtgtttatattttaagaatggatggtaatagtttccctaatggtgaatcatcatatggtgaaattaatagagatggtttatcatttgatgaaagggcagttttattaagtaatgcagtttcaattgattttgattattttagtagacatagtggaggaccaggatttttaatgtttggaggtggtggtgatgatatatagtgagtcactaatgtaaataaataaataaataaataaggtgtgtacattcattaaatagtttatagcatttatataatataatattaattataaattattataataatataaattaagctgagaaaccgataacaccacaagcaggtctaccaccagcattaccagttttaagtgaatcagcatgaccacctttacctaaatcatcttgaccaccatgaacgacaacagttctacctaaaattgaattttcaccgaaaagagtaactaatttatcagttttggaaccttttgctaaaccatttgaatcagttttaatattacctaaatcaccgacatgtctattttcatcctctggagcaccatgagttttaccaaatggattaaaatgtggaccagcagaggtacaaccattagtattatcaccaaattgatgaatatggaaacctcttgaagaatctgcatcattaccttcaatttcccaagagattgaaatttcatcagaaggtgaagcttgttcaaataaaactgtacctttaacagttgaatcacctcttaaaactgcgactgctttaaccataatttaattgataactaattgagttgataaaaggaaagaaacgaataagaaagacacaagaaaagggtggcaaaagtgaatttatttaaataataaaccaataaattagtcaactcccccggatataacataaactgagaaactcttagtaatacaatagatctatttattgattctattttctaccattaaggttattctaattttaattttaattttaattttaattttatttcatatggacagtcgcgtctgtctctttgttgattatgtaattggttttgtgctttttatttttattttagttgacacttgtttgtataaatttattattatattaggagattattatcatttcttttggaaattgtatcttatactatccataaacaccacccaatgcctaatatcttcagattctcaggtgatttggctcatcttgtttccattcttatacttattcacttctgttgaaactaaaaaatctgctaaaagtatctcattgaaaactcaaattttatatgctttagtatttattacaagatatttaaatttattaacttttgatttctcaggttccctttataatactttattgaaaattatctttattggtacaactttttattcaatttatattattaaaaaatatacaaagcaaataactcaatatgttgatgatttccaaatttcttatattttaataccttgctttatattatctttaatttttaattataaatttacaattttagaaatttgttggtctttctcattatggcttgaatctgtttgtattttacctcaattatttatgttagcaaaatcaaggtgaaggagatttattaacaattcattatatttttgctttaggtttatacagagctctatatataccaaattggatttatagatattattatgaggaaagatttgatataatttcagtatctgctggtataattcaaactttagtctattctgatttcttttacatttattataataaagttattaaaaatggtttaaaattacctcaatagattattatatcctatataatataactcttttataatataattataccattatataattgaattagatcccaatatatattcattcttatattcttaatctctactctttacgtgttacgtgttatgttactaagcgagttagaaaaaattcatgttagtatcacaacatcttcttctgtcataaaggactcttcaactgtcaataatctcttgttttaacatgatttaaatgtcattctaagttgatagcttgaaagatatattaatttttctatgttcaattaccgtattgagtatttatagcaaaagaataagtactttgaagcatgaaaaaggaaaaaaactcggtcaaaaattatcagttgagccacctaaaaagtgaaaatcactgatttcatcaattatcaagaatgatattaaactgttaaaattatttcatccaaaaagaagacaaaatataaaaaatttaaactgaaacaataatttacttccttataatgacttatctacattcttcttcaattaaatagtttcatttatttattttattataaatttagatagatagatagatagatggatattaataaagacattataaaaatgatacacaattaatctctctttaatggataatattcagtacgtacaccatcttttgtaacaattaaaatttctaaaccatcaccaacttcaatatgtctctcagttgcagaagagaatgcatctctaactaattgaataacttcctctaattttaaatatctaatttcttttggttttgtaccattagaatttggatccatttgatttttaaaattaacttgattatctaaaaatggcataattaatgaagcagctgcaccaccagctctacattgttccctttcatatgaaccaactggatcaaatgaataaatacatcctttaccttcatcatctaaacctgctaaaattgtatgaacataatatgggaaaaatcttttaccatataacatatgctgtattaatctagctgcacttgaagttttcaaatttttattatgattaaaatgataccattttaatttattttcaaatactttaactaattgatttgcatcacctgcaaaaccatttgcacttaataataaattatctccaacattgaaaacttttggttcatatcttgaattaatactatatccagttgtttgtcttgtatcacctgctaaaactgcaaaatcttcacctgcaatacctaatatcgtaccaccattatctgaatatggattaaaacgatgttcaattggttcattacgtacttcattagcatattctgtagttggtataactttttgcattgttatttgttaatttataaatgataataataatcaaatactgtatcttttgccctcaatctaccgtctctctctgtagcattgtcaatttagaaaatcattattttcatgaagtgagaaattaatatgcgattacgtaagtatttttattttattatattacgtaactattattgagatgattagctaatagtatatttcacggagtagagattattatatccacgaagcagagttatatcatcgatatatgagttttggatgttttagattaataaccggtttattatagtctgtatattattaacatagcaaccaaactttttaaaattttggtaaacatcgtatatattaaatttcattgtttatagtatttatttgaatttgtaaatatatagtatagcaattttacgattacaaaaatttataataaaaaatttaggttttgaaatttgaatttaaagataaacaaacacgtccgtataataattaggattttttttggtgtaaacaccgtggagaataggtaaacagtttgtacctattttgtgtaattattattacaaaccttaatatatgcaaaagtgtgtatattattaggtaataaaagtaaaaacaaaaattatttaatccaagtcaagttaaattgtctattaaaaaatatgaactcaactcatattttttaattttaattttattttaataataatttcggtcagtatatcttataacctatttatgtgaaatattactgaggatgcaaaatattgtattgaaattcttttcatgatatctacacctagaaacataatgattatgatagatattgatatcagtaatttccatcttaatataacaaacacggtcaacgttgagatgcgcagaggaccaagtatatggggtaagaaattatacaatacttcattttttcattttttcattttttcattttttcattttaattaccgagaaaacgagaaaacgagaaaaccaagcagatcggggagatttggaaattaccgtttgaacggtttgtacaccgtttaaaacgtttttaattatgtacgggcgtattgttattattatttaatttaataatattattatttattgttgatattatttattgttatcttacgatgatgtctttcataaatatattatttagtaacaattgggtctaagccctttttttattattattattataactgtattatttgattaataataataataatagtaacaataataaacaatcggcactatccaatcagacacttaaattttttagtataatattgaattaataagcctagttttcataaacgattagattcaacaatttgttctaatacattcaaatatgagaaatttatatcccaataataggttacatagagatatgaaatatctgttataatgtaactgctacgaagatttcccctcagtttagttaccgaagtaacggtacaatttttaaaataattaaacgggaatgatcccacatatacgaataatataaattatttaataataataataataatagtaataaagaaaattatttattagaaacgaaaaacgttacattttggtaaattattctttcttcgcacagtatcgccaaacttgcatattttctcattggttcatgcgggggaacataaataataattttccaattatgtttaatattatattttctattttctattttaggtttttatgttgattagaaatgtagatactgtaccatttttctagacttttatttgaattgataaattcattataataatagtggaaacgaatttccactctaccatatttcatgcaaagctaatttattattttgattgtaattcctattaaacaaattccaagttaattttcggaaatgttgacgattctattacaaagtaaatacccaatttattcaaatagtttgatttaaaaagggtgaatagttccttaacttttgatgataatttaatacttgtttcaaaaattattttaattacttgttcatcaaacaaataaaaactcaaatagtattacctacattatttaacaatgaacgtatactcttttattattttttgtcttacctttggtgttgctaatgttaatgctaatccaaatcagagttcaatggacaactactgtcactaacgtagttgatggtttacctctcaaagcaacacctgccccatttgttcaatctccaaatggtcatgccccagaacatttatatgcttcaatttcttatggatgatgaagtttatccagttggtgaaagtttatatagaggtatcattcattttcaagcaaaacatccagaatattttcaagaagttacaaaaattgcccttttatttgatgagcaattgtatattcatgatactcatgatattccacaaagtccttattgatggtagttcttggtcttcagaatttatttttagagcaggtgaagatggttgtatgtctgaaggtaaacaaattcaaatagaatttgcttatggtgcaattgatgttacaagtgttgattatctttttaagagaggtacaggccctgatgttcaaggtgattttccagtcatttgtattgataaaagagaaccaccaacaccattaactactacaagttcatcctcaacattaacatcaacagaaacacaacctacaccttatattaccactgtccattcatgtgaatcatcctttgttgcaacatgtgatccaattccaacaaatattagagatgaaacaatatatgcatactcatgtacttttgatgatcctattcatggtaaatttaagaaaagtttgactactactactatttgtgaaacaggatacactataaccaactacattattccagatatttgctgtccagcgccaccaccatcagcacattcaactactgtttcatcatgtaatagtgcatatggtgcaacatgtattccagctccaacttttgttgctccaggcatttcagcatacactgtctcatgttcatttactgatcctgatgctgctggttcattcactacagatacaacagttaccagtatttttagaagaagttatactattactaacactgataaaccagtcttaacttgtccagaatcaagtacatcattaacatcaacttcaacatcatcctcattatctacatcatctaccacttcaactatctcaaccactagtacttcttgcgaatcatccacttcatcaaccttaagttcatctacttcatcaagctcatcaagctcatcaagctcatcaagctcatcaagctcatcaagctcatcaagctcatcaactttatccacatcaagttcatcaagttcatcaagcttatcaagctcatctagctcatcaactttatcaaccttaagttcatctacttcatcaagctcatcaagctcatcaagctcatcaagctcatcaagctcatcaagctcatcaagctcatcaagctcatcaagctcatcaacttcaagcacatcaagctcattaagttcatcaagcttatcaagctcatctagctcatctacattgttatcatccacctcatctactttatcaacattttccacttcatcatcaatctcattagcttcaagtaccacaagtacttccaccaaatcctcaatggtttatagtaagtcctcaaagacatactatacatcatcattatcccctaagcatgtttcatcagtacctgttgtaccatcatcaactttattaacttcatcaactttatcaactttatcaacgttatcaagttcatcaagttcatctaccttatctacattatccacactatccacattatctacgtcaagtttatctacttcaagcttatcaagttcatcaactttttcaacttcatctacttcaagtttaccaagttcatctacttcacttacttcaaagacttcattcagctcatccagctcatctagctcatctacattgttatcatccacctcatctactttatcaacattttccacttcatcatcaatctcattagcttcaagtaccacaagtacttccaccaaatcctcaatggtttatagtaagtcctcaaagacatactatacatcatcattatcccctaagcatgtttcatcagtacctgttgtaccatcatcaacttcatcaacatctttaagttcatcttcatcctcattcttatcacaataccgcagtgtttcatccacaagtataacaccaacctcatccaccacatcatctattgattcatcattatcatcatctatcgaatcatcatcatcatctattgaaccatcatcatcatcatcatcatcatcatcatcatccattgaatcatcatcattatcatcattatcaacaacatcatcatcatccattgaatcatcatcattatcatcattatcaacaacaacaacaacaacatcatcatcctctattaactcatccatttctggttcatcatctgaatttatttcatctaccaccaatttaactccaagtactaaatcatcaaccacttctacaggagtcttatcatttagtattggttcatctgtaggttcattgtcattccatattggctcaaccactaattcatttgttactaaacaacttgatacaactacaactacaactgttccatgtaccacatcagcttctctcagtaatttcatcattacatcagttttaactacaaatgtctctgaacaaactacaacatcagcaactacaaataatttagtttcatcagataccactacattagaaataagttatttaaccagtgcaagttctgaaactgaaataaaaactactacaaatacttcagaaagtataaagttagcaactactacaactatttcaactttatcaactagtatcactgaggaaaataattataccactattactatcagtactagtactaatagtaaaactaatccaacaatctcattctctacatcagttccaccatttgaaactaattctacacttcaacaatacgaaggtatggcaggtattatcaaaccaactatttttggtaattttgtcggtttattattactatttatttaattaaaggaacaaaaatgtatttcatacttttttcatgttaaattttaattgcaaaaatgatatctgatttcggatattcattaacaatactcacttggatttctatcaccaaagtattacttacttaatttcgatgtttcacctcctttcattcgtttattctctctttctaatatttttttatctatatataaattaattgataccatctatttaaatataaaaataaaaaaaattagtacattactcgattcagtaaattaatagttaaattagacgagaataaaatcccctgtaggattttggagggtaaatttatttttcgttccgcggtgagtggtgggggtaagtacgataagatagatattcgtttaagataaattagaaagcgttgcatctcaagatgaggtaattgtgggtcaattaaaggtataatgtcttatagtagttttcaaatagaagtgaattatataaataatattttgtacttatattcaatctactgtattatccaaagtaatataaaagtattttattttcaaataagtagctgctatgtctataaatatcatataagaatgtgtagatcgtttattgtagaagaaaatttagaagttgaaaaaaaaacccccaaacccacataaataaaaaaatgacaataaatactagataagtttatacaataagtttattttgacagattacatcacctttttgcgattttcagatttaatgaaacattaatttttaggtatgttaaaatatttgaattttgagatctataaattctttaacgtaaaccattatgcaaaccattatgcaaaccattattatgtatactaaatactttaaagattgaaaaactaacactaagaattcaagtttttttttgaaagactttatcctgttgatttccaatgaaaatattatgtaaataaataatacaaatatttaattatttaagcctttcctcacatcaagaagagcataaacggctcattaacgcatggaggtataatattaatattaataaataatagtaacaactattggtataattatcttaaaaaccaataagtctagaattgaaagctgtatcaaggtcaaaatatttccattaaacgaaaataatgaagtaattttggaaaatcaattaaatgtgggacttattataaaatgtcatcgccctgttattttcaatgtagtattaataatttccatctttatcaatggaaagacaagttaaaaaaaatatgcgagggaaggataggtacatgaaaaaagggcgaaaaggataaaaacgagcgaaaaaactaattaccgagaatttctttctctttatccatcgagatacttatacaatgaatgaaatttatataggaagggcgaaatcataaccgtttttttgttaaaaaaggtctttaactgttttatattgattttacaaattgttttccattatcatttttacataatggaataatttattgtacataaatgtgtgaagagtcatataaaatattatattcaggaaattataagtttcatggaaatgatacgatttatctaattattttaatctattatccaactatttaataatcattctgaaatttactgcttgtagaaaaaattaaaattaaaaaattaatgtaaggtgaaataaatggagctaatttcaatcattcgtaaattatttaacagaatatagccagaccataatgctggagcattcaaattaacattaatattagacacagttttcttaaattttgctcccttttcactaataaaaaaactgagccgccgctaaatacgtaataaaattaattttcaaaaaggcagtatgtaatgtaacattaaataattatcaatgagccgtcaaatttttctaaaattctgttttaggttagcgtatttcctatttcggcaatttgattgaattttgctattgtgttaattttgttgattttaatgttttctagaataattttttatttgcagtagtccgataaatgtgattcttaatctaaagcttaatctgaatttaaacccaaaccatttcacccttcgaacaagttattaggattcggtattatgccatacttcatcatttccccattttatttcattcaagtttcagtatctttggattcattttatttgaatttggtttagtttaaaatagttccatttaaaaagatacccatgttctcctttttttcatcttatgatacttcaatgatagttttttaatacttcacaatatttttgatatttgttttattcatcaacaaacaattaaatttattattgcattgtaatatgaatatactttcatttgttattttttgtctaacatttggtgtgattggaattaatgccaatcacgatatttattggccacatagaatagtaactacggttacttcttgtgagaaagagtatgttgcaacatgtacaacagactattcttaccgatactactacgattacgatgttaaaactacctcatgttattttacagatgatattaacggttattttacaacttcaactactgtcaaaggaaattggccctttaaatacacaataaccaatacaaattctccagttataacctgtccaacaccaccacctccaccaccaccagcctatccaactgccgttacttcatgtgataccacctatgatgcaacatgtgaaccatctcctacctcagtcgctcctaatgtcactgcatacacattttcatgtcagttcaatgatgaaaacgtcagtggatcatttattacaggcacatcaaccaccaccatcaacaactcagaatacaccatcaccaacaccgatcaacctgatgttacttgtccagctccaacaacaacatcaaaatcaagtagttcatcaacatctacatctacattatcctcatcctcatcctcatcctcatcctcatcctcatcctcatcctcatcctcatcctcatcctcatcctcatcctcatcctcatcctcatcctcatcatccagtagttcatctacatcctcatccagtagttcatctacatcctcatcatccacatcatcatcatccacatcatcatcatcatctagtagttcatctggtacttcatccacatcatccacatcatccacatcatcatcatctagtagtttatctacatctacatctactctaagctcaagctcaagctcaacttcatccacatcatcatcatccacatcatccacatcatcatcatctagtagtttatctacatctacatctactctaagctcaagctcaagctcaacttcatccacatcatcatcatccacatcatccacatcatcatcatctagtagtttatctacatctacatctactctaagctcaagctcaagctcaacttcatccacatcatcatcatcatcaccatcatctggtagttcacctggtacttcattcacatcatccacatccacatcatcatcatctagtacttcatctacttcatccagtagctcatctacatcctcaccatccacatcatcatcatctagtacttcatctacttcatccagtagctcatctacatcctcaccatccacatcatcatcatctagtacttcatctacttcatccagtagctcatctacatcctcaccatccacatcatcatcatctagtacttcatctacttcatccagtagctcatctacatcctcaccatctggtacatcatccaaatcatcatcaccatcatctggtagttcacctggtacttcatccacatcatccacatccaaatcatcatctagtagttcatcttcttcatccagtagctcatctacatctacatcctcaccatctggtacatcatccaaatcatcatcaccatcatctggtagttcacctggtacttcatccacatcatccacatccaaatcatcatctagtagttcatcttcttcatccagtagctcatctacatcctcatcatctggtagttcacctggtacatcattcacatcatccaaatcatccacatcatcatctagaagttcatctattttatctggtacctcatcctcatcatctacatctactccaagctcaagctcaacttcatcctcatcctcatccaacagttcaactacagcaacaccaagtacttcaccatccagtagtatagcaacaccaagcactccatccacaacagtcacatcatttagtagtctatctacttcaagcttatattcgtcatcatcttcctcaccattatcatctagtagttcatttacttcaagttcaagttcattatcttcaagtagttcatctacttcaagctcaagttcatcgtcatcctcatcattcaacagatcagctacaacaacaccaagtactttatcagctacaacaacaccaagtactttatcagcaacagttactctatccagtagtccaactacagcaacatcaagcacttcattatctaacagtttagctactgaatccccaagtacttcatcatctaacagtttagctgcagaaacatcaagtactttatcatctagtagtttagttactgaaacctcaaatttttcatcagcaacagacacttcatctagtagctcaactatagaaactcaaccactagcttccccatcatccgtcacttcaagtacatcaaacagtttattgttatcttcatcatcaccatcattaacaatcaccacccaggaagtcatttcaactaccaacttaattcttatttcacaaactaccacaataattgaatcagcaaataatccaattataaacacacgtacagcttctctcagtaattccatatcttttacaattattacaacagctaccgatgaaaccattgtaccatttgatataacaccaacattgagctcagttgagacaactggtttgccaaatacatcagaggagataacattatcaactttaacaactgaaaccatatccaatttaccaaaccaaccatcatcaacaagtactgcaactaattcagcattggcagccacagaacaagtttatggtataattaatactacaggcacagcttcaggcacagtttcaagcacagtttcaggcacaatctctatttccacttcagtttcaccaaatggatatagttttactcttcaaggatatgaaggagatgctgctataactaaaccaagttttattggtaattttgttggattaatgcttttatttatttgattaagccaacacaacaagttctttgattcaaattaaccacaaacataattaacctcgttctaatcataatattgtaccttgttacaatgatgacatccgatttcggatactcgtctctacattcatggatttccatcggataatgtacacttttgttttttctttaagtttctgcttcaatttttcattagctttctttataatttttccatatatatacagcctttttaatcaaatgagactaactagtaatatgtaaaaatcgaatgtatcttagttaagtccgttgtaacttcattttcaactacccgtaaaaattttgaatccccagtatttttattaagcgtgggggaagtttactgggaactaaagaataatcgccggtggctataaataaagttacagcggactaaaccaacatacatttggttactgaatattactagttagtctcattcatttaaagagactgtatatataatcaactagtattacataattttacacgttctataatactttcaacagcttataaaacttacttatctcttttgatacgtaaaggtaaactaaagtcacatttttttatattaaaacaattattttatttctaaatattaaatataaaacctaaaagtcaggtttaagaaagtaaatataaggattagcaaatgtttaaaatatagttatagtaaaatgcaataacttgtaagtgtgaatcaatatgaacatattcattagtaccatgcatatgagcttcaaataaattagttataccaggttgagatctgtaaatatgtgtacttaatttccaataatgtctagtatctgtattaccttgcattgtagttggtgttataatataaggtgtatcaataaatttcccagggaaaacttccctttcatagaaatttctcataaaaccggttaatctattccaaatatcatcaaaaattggtgtaataggtgcaaccggtaaataatataatgttctaattttaattacaccatttttagttggttcaattaaaactttatcattaactaatagtcctaaatttgattcaattgcaacagttttagaatgcttaactgcctttgataaaactgtatcttcattatcaccaactgcaattctatgattaatgacagcagttgcattataaggaagtgcattatatttcgtaccaccagaaataacatcaattgcttgactagttctaattgtatattcgaataatgaaacatttgctaatttattaattagtagattctttgctaattcatttgctcttgaaagttttgtaataagtttataaaagaatggcaacttactctgctcagaaacacattcaaaaagatttagcattggattttcatccggaattattggtttaaatttatccttttcatatgaacttaaaatttcagataataaaccaattgatgttttatcagttggatttgatgaatgtccacttggtgcattaacttcaattgctaaatccaaataacctttctcagctgtaacaacaaatccataatagttcttattaactccaatacacattggagcaccttcatctaaaatatgatcaattgaatcaggaccatatttctcaaaaagataatttgcaatatttttagcacctaaatcaccactaatctcttcatcataaccaaatgcaaatataacagttctattaagtttatgatttggatttttttgataaatttcagtcattgcacccattaaaccaaccaataaacctttaatatcattagatcctctaccataaataatttcatcatcaaaatgaccacttaatggatgatattcccattcacttaaatcaccaaatggaacagtatcttgatgtgccatcattaatattggttttaatgatgaatcagtacctttaaactcataaactaaaccataattgttgattttagtgactatagcattttgataaactaatgggaattcagtttgaaggtaattatgaaagtcaatgaatttcgaaaaatcagtcatatgttcatcaacaactgtatcaatttgaattgcacgagataatctttcagcagcaaattttctaaatgatttatcatgtaatagaaattgagtatcgttatgatcaaaagtaccaacatattcaggaactggacattttgattcattactaaataaaggtgagatattaacagccgtaggttggaaaacagcaattgaaatagctaataataatccaactaactgtaaaattacaaatttagttgatgccatattttataatatgtacaatgtctttaaaaatcaggggtgaccaaatgatatcaaaaaaaagatatcggactgttagtttcaaacttcaaagattgagcccttgttttaattgatatacatcgattaaaaatatagttgaattatgggggatcaccttaggacatgtatggaaagtcgtcgtcgagaaaaggggagataacggttgcatattacgtaacatactcacaacggttgtaatataaacgattaacaacgtatatattattataaataaacgttattatataaatacttagaatacagtatacttttcatcatctgcactacgacaccaacattcatccacttcattctccatctgaacaaagcattgatcaatgatattactatgttttattaaattatcaatttttttcctaatttgaagtgcattttctgttcgataatgttgaacatgaataaaaccgattaatttagaatctttaccatcctttggccaaaactgttgtactttataacttttaacgccagatattttagtaatttcattaagtaattgagataatttttgtttcttttgatcacttaataataaaagtaaatttgaggatgatgatttaagtaatggtatcgatgacattaatataagtgttgcaatcataactgatgtaattggatcaactaattcccatcccgttattttaactataattgtcgatataataactccaaccgaacctagtgtatcagccataatatgtaaaaagattccatgcatattatcatcatcatgtgaatctgaatgtttttcattactgtgatcattgtgttcacattttgttccatgactatgttcttggttgtgagcatgttcatgattgtgttcatgagtgtgttcattattatgctcattgctatgttcgtgactatgttcatctttgtgttcatgtttatgttcatgcttatgatcatcattgcattcgtgactgtgttcattatgtgttgagtcatcattagatcctccaaatgaatgactatgagaatgtccatgagaatgatcatgaccatgattaaatgcaaatatacctaccaaattaactaaaaatcctaatgtactaacaattaacaattcagtagtattttctaatttcattggatttaaaaatctatgaattgattcattataaattccaataacaataactaaaagtaaaataccattagtaaagcctgataatgcaccaattctacctaaaccaaaaggatatgcctcacttggatgttgtaaattatatttactaacaacagatgccattaaacctaagaaaagagataaacaatccaacaacatatgaagtgaatcacttaataaacttaaagattttgatcttaatgaatataacaattgaataaacatgaatgctaaatttaataataagaaattcaatatagattttgattccttggaattaattaattgtatgaaaagatttaagagtggtaaacctgaattttcttttaaatcattattaatttcattaagatctaattttttatcagataatatatcatcatttataattgtatttatgtttttattacccatgtagaccataataattaagaatatatttataagagttgaaattgaatattgagatatgaaaatttcaaaagcatttttcaaattaaaatttggtccaatattatcatttaagaacaaaattgataagataataaaatttaatatgatataatatgatttatagtaatgtaaaataagtttactattcatgaattcactcaaaactgaatcaattctaagtttattaggtctgttagtttcaaattgagtacaaattaaaataatcaatgaaccaattgatacagcaaacatattaaaattataattatcaaaataaaaatatgatatattcaataatgagaatattataataacgatatgcaatttaatattgtaattaatatacgctatacctaaatagacaccatttttatttttatttttcatgactgaattaatgaagaaaggaattgaaataaaggtataacctaatatatgagatgtaaaataatcatttgaggagtaaatatcatttgacagatccaaagcaagtgaaataatgaataaaatgtaaatttgaaaattttgataagatgaagaaaaaattgattcattataatcctttaatttcaaagaatcatttgaatatatatcattaaatttatttaataattgagatatgaatattaaagatataactcttaatggaccaagataagaattagctaaaaataatgacatcatgggtatccaaagatagatgaaatttctataagcatttaatttattcaaagaatgatgatcattataatcagataagaaatctgaatcttccgagacgtattcagaaccattatatttaagaaatttgaaaaacaatagtatgaaaaccactgataatgaagcaaataatgaagattgaagtatattaacaggaaatgaagcaaatgagggtagaattgttagatttagagatacgaatagggtgggcaacaccaataatagtggtgccagttgaacagacattatcaaaagtcctttaatttcaatagaatgctgtttaatttgaatttaagtctaagtattcaagtgtaaagttactgaataaaaatgtatgcattataatctatatacaattccttaatgttaatgaatacgtcttctatagaggaaatttaagaccctgtaggtctgcacagtcgcgtcggtctacagactactcttacctattggattgacacacttcaccccatatcttaataccttcaaggataccttcactggtcagatgactgatggatactctcacaccgtgttccccccatcctctttcatctccagtaacttcaaagttatctcctgtagctaaaattacacctcttttagtacattctttagcaattgcaatattatcatattcatctggaagtgtgatccatgagaaataacctccatcaactggtgaaatctttgtaccattgggtaaatatgttaaaactgccttctttaatgtatctgcacgttcactatagacttttattcaaattagcaattattttatcaacttcaccagatttaattaattctccaataatgacagtattaaaatgacctggtgtaccacctgacatatttgctccacctgaagctattaaattggctaaattaggtgttgcagtctcttgccatcctgttcttaatccaggtcctaataatttagaaaatgtaccattggatataacattaccatattcttcaccatcaggtaaagtttctctatctaaataaaccattctcttatgatgattataattttcatctttaccaaacttaaaatctaataaatcataaacatcatcacaaataattaacatattatattttctagcaatattgattaatcttaatttagaactatcagataatgatccaccctttggatttgaaaatgttggtacaatatagaaaacataattataaatcttcttcattggcttattaggatcatgaattttataaattgcttcctttgttatcttagttgaaggagttttagattcaatttcctctaattttttctctaatgagtcgaaatcaatatcaccattatcaaattcaacaatacttgttaatttacctgcaaatccatgatcaatgattgcagaattaatgagaaaataagttggtgaaatcatgaaaatttgttttgttatattatcaaatggtgcagtacattgaagtaatgcattcattaaaccaaatgatgcaccatttgttaaattaatacaatttggatcagttggttttgttaaattgaaatttttatcattccatttagcaattaaatctctaacttctaaattacctaaatctggtccataatttaatggatgtgtattatcacgaccatcataatgagctaatgtatcagtgaaagtttctaaaactttttgtgaagctttaagaatttctttacttggtaaaagatcaacggagggatgtcccttgaagaaattgtatgcaaccactttctgatgactcattgcaatgtgatatatctacaaacaacagagattaaaggtcaattgatataaacatgttgtgaaccaccaccacagtttaaagagaggaactttgattcgttgataacggaatttttcactcgcttatcagatggattacgtaatatttggtatcagtataattggtagcaagttattgttaactattaattcaaaggaaatacagaaaatacacaaaatgcacaaataaaaactataaaaactatttaaacaatgatatatcaatattagcttgatcacacaattctctaaatataccactttcatcttcaaacaaaacctttggttcatcaaattgaacaactctaccagcatccataactgcaatcttatcaaaatctaaaattgtattcaatctatgtgcaatagacaaaacagtacattccttgaaatgattactaataatgttttgaattctttcatcagtcttataatcaacacttgaagttgcttcatctaaaattaaaatttttgtccttttaactaatgcacgacataatgcaattaattgcttttcacctaatgaataatttgatccattatcatcaacttcattatctaagtgaaatttatgacttttacctttaacaactaattcatccctaacagctgatacattttcaattaagcctgcaatttttaaagcattccaaagtgtatcatcatcatattcacctagttggatcaatattggttcttattgtaccattaaataaaactggatcttgtggaataatacttaatgattttcttaatctatttaatccaattttactaatatcaataccatcaattttaattaatccttcaaattcagttaacctatataaacatgtcataaaagttgatttacctgcaccagttctaccacaaaaaccaactttttcagctgagttaattttcatatttaaattctttaatgcatatggaagttcaggtctatatttaagcgaaacatcatcaaactcaattttaccacttgttggccagtttggttcaggttcagtttcaggtatttcaaatggtgattcttgtattaatttagatgaataaaaatttaatctttcaacagcattaaattcagtttcaatttgagctaaacatctaacacaaagtgataacattggtggaacattcattgcataagtcaataatagaccagttgatgctgcactaatattgaaaactctaaaacaacataaaaatgaaattaaaataaggaaaccaaatgtaacaacactaaattgttgacctaaccatctttggattgcccatgtaaggaaataaacatcattattattatcaattaaatcatttaatttattgaaaaaataattttctctaccaaaagctttaatcgttaacataccttcaattgtttcattaaaatgagtatagacaaatgatcttgtaactgcatcaattcttttaagttctctattagtcgcttgataatatgctgttaagaaaacatataagaaaactaaacctggaatagcaattgcaaaccatggaagataaataatacataaaatgagtgtaccaacaaccatcccaattggataaacaactaataaaaattgatcagcaatttcattatctaaaacatcagtatctttagtgaatctatttaaaactctaccaagaggtgaaatatccataaaaacaacaggtgctgttagaactcttttcattgcaccaatatttaatttctttgaagctgtaactgcaaaataaccaatgacagcaaattcaatacatgtgaatataacatataagaaattgaacataatataaataccaacataaaatccatatgatcttcccttgaatttatctgttaaccaaaacgataaccatgtatttgaaaaaatatttgaaaatgttgtagcaataatcaatgataagaataatggaatgaatactaattttaaaacaccaactccatattcaaaatatgctttgtaaacatcaaatcctaaagcgttaacagctctctcttcatctccaatgattttgacaacattattatcgttaacagtttgattattttctaccactttattattatcaatttttttcttgatttttttctcatttaactctttatcttcattatcaattggacttttagcaacagtattgaaaaattctttaatatgagggaaggattcatttaattcatcaattttgccaacctcacaagtaccatcaccattcataaagactaatctatcagctttttcaattaaaccaatttgatgagttgctaaaataactgttttggattgtaaaataccacaaatacattgattaacaatgtgtttaccaacttttgaatcaactgcacttaaaacatcatctaataaaataacatcagtatctgcataaatagctcttgctaaattaactctagccttttgacctccacttaatgtaataccacgttcaccaacttcacaattatcaccagaaataatttgtttaaaatcattgtctaatgaacaagctttaataattttagtatacttttcttcatcatattctttaccaaataagatattatttttaattgaatcattcttaatccatggagcaccacataatatattagaaccattgatagagactgaacctttagttcttttcatgaatccagaaagtgcaagtaataatgaagttttaccagagccaacactaccagcaataataataaattcacctttcttaattttgaagttaatatctttcaatgaatcaaaatttctgtttaaagatgtttcagttgtgtcagttgaaatttcagatgaaattttagtttcagttttttcaatatcattttcatctttcttatccataatattatcattttctttatcatgttcattattaaaaatttcccattcaaaatcacaattattaacattgacagcatactgggaatcatttaaattatcaattttaaaaaaactttcattaacatcattacatgacataaattcagcaactcttttaagaccaactttaccacttgcaattgcagaaattgattgaggtaaaacaaagaaaacaatagaaagagattgaaataatgataatgaagcaaaaattgaaccaaaagatttatcaggtgaaacttttgaaactgttaagaaagcaaccattgcagctaaatttggtaaagacattgaaaaagccattaaaatatttttaattgtttgcatttgcattgtatatttcatttcccttgttcttgcatcaatgattaatttttcataataactttcccaattataaaatttaaccattctaaaattacttaaaaattcagttgttaatttaactcttttatcagtaaatttagaagccaaaactcttaaagaggctaaacttgtaaaagcatatccaattaagaaaaacattagaacataacaacctataccagctaatgcagagaacaccaatattaacaattaataaagcaattgtaatacctaatggaattggacataataatgtaaaacttgcaagagtaaaaagctctatcaattctatttaaatcagttgacataattgaattaattttaccatttggaaatttatgtttaccttcagcatcaattgtaaaagatttttctaaaactagtttaattaaaacacttctagcctttgcaccacaatttgtacctctataaaatgaataattaagggaaactccattaataaaaactaaaagagcacaaccaattgcataaccaacaccactaccaattttttgctttacaatatctgaattttcaacaaaatcagttaattttctcaataataaaggagagacactattagaaatatctgaaactgcttttaaaagcatattcatattaatatcaaacatgaaagtatgatataaagcaattaaaatcattatccatgtaacaacattagtttcatttaaattatctttttgtgatgtaagttcatttaatttatttttaaaacaatcataataataatccattgattcagatgtatccttaagtgtaaaacaatcattatgatgagcagttctattaaaaccagatttaataactggatttaaccaataaaacatcatttgagaaatcggatttgatttaaattcaggatatggttttctttccttcatcacttggaataggttgaactttttctagggaaaaagattgaaaataatcttttttgatattttagttcatcaggagtttgattttctaattccatatttgtatacatagttaatgaggaacatattttattatttaaagaacataattatttaattgtgggaaatgttccctttaaataattattgttgataaagataaacaatatttgaaaaacgataataaatgacaaatttccattgctttctattgattttatgataaaaccggcgataacaatattcatgttactattaaataaggatataaataataataccggtgttaactcggtattaacggtgataagtaaatggtgacaatcggtgatacgaaaagttaataaggattcaaaatattaccagtgttttacctttaagttgtcattattatagtgattaagaaaggtttatgtgattcctttattgatgattacactataataaacaatattatacactttaaggtgtaaagttaacaacaaattaaggttcattactgtaaaccctgaaaaacagcacagccttggaagttttgctatgttccacactattaagcgaaatcttgatttgatatacaattatagtgattgattgattgattgattgattgattgatttataatccttctattttgatattttatattagactagaaaaaatttatgatagtattaaataacttataaactataaaaaacccaaagcaatgatgaaaagcagataaataataaaaaaaataaaaaaaataaaaaaacacaaaaagtataacaaattgttcaaattgaaaaaccaagtaggggaaacgtagaaaaaagataataaatgtcaatatgaaatgaatatatcaattcgaagtcatagagactaaaatacaattgggaaggaataaaatacagaaccgtatatcagtaggaaaataattattattattgttgaataccatcatctaaaataccaaattcaaaccatttatgttttaatgcttgttttgcagttaatctccttgttggatcgaaaactaataattttttaattaaatcaatataataataccaaaaaatataatcatgtttaaaattttgattaatattaaatttattcattgaatctttaacattaaaatctaaattaaatttgaatccagttttctcttcaactaattcttcaatatttttgaattgattaacttcatcaattaaatgtttttcagttgatgattttgggaataataatttaccacttctctttgaaaatgattttgcaattgatgaatcaaatctactatttgattgattatttttatttgaatcacgataaagtgttatacactgtcgaaccatttctaaatcaactggttctccgataactttttccatcattgctaaatgttgttcattttcatgagttttaaataatgcttcacctgttaataattcaattaaaattgatccaactgaccacatatcacaaggaaatgaccaaccaacacctaaaataatttcaggtgctctataatgtcttgttgaaatgattgatgaatgatattcatcttgaaaaattgctgaaccaaaatcaattgtataaatttttggatcttttaaaatttttctaaataatgtttcacttttatcattattttcataatcaattttatgataaatttttttacaatatgatgaatctttaattaaaatattttcaggttttaaatctgtatgaattaaatttcaaatcatgtaaaaatgcaacagatcttaataattgttttgtcattgcttgaatatgagatccctgggaatggtaaaaattgatttttttgcataaaatcaaataatgaaactttttaataaatctgttacaatacaaatatgatttctataatcaaaacattctcttaaatgaatacattgaaatttattatttggatcatgttttttcaacattgttaaaactcttaattcaattttagaagcttctctatattttggaattgatttaattattttaattgcaacaagtgaattagattttttgatcataagctttaacaactttaccaaatgtaccttgacctaataattttttaataataaatctaccattagcaaatgttgaatcatttttaacaatataataaccatcttcatcatcacaattttcatcatcattttcttcaattatatgattactatttaattcatcattaatatcaattaaattaatatttttcctatttgaattcatttaaaattttttcatcataagaacttgttgctgaagaatttgaattagtatttgatttagaatatgatgaatatgaatgattagatgaaagggaattttgtttaaatgatgattttctaagactataagatttatttgaattatgaatgttgatattgttattattattattaaaagaggtattttgattgttcattcaaagtgttattattattattattataggtatagttattattattattattattattattattattattattactattaatggtattaggggtatatcgttgaattagggaagcttgaatttcaccaatttttagagagacttcatctctatctaaagcaggagaataagttaattttgaataagctaattgaggtaaagatttagttctttttttctttttttgaaatataatttcattattttggaaagttaaatcatttgatttacccttctttaaaaatttattgaaaaaattattaaatggagttgaaatactcatatgtcttgttagttttttattatttgaataattttcgaaataatttgaataagatgaatcatctaaataattattatcattaaaatcacttattagcattattatcatcgaatatattttcagtttcattatcaatgttattacctatcactttcattatcattaataatatcaatatcaagatcaatatgattatgattattattagtatcattgttatcattatcaaaatcaagaatagcatcttcattatcaggatcatgataaagacttgaagaattgaagtaatgattatcattattattattattattagtggtattatttgagataacggttgaagtttctagacataagttattgttattattattattattattttgaaataatttatcatcgatattatcaattatatccatatcatcagtatcatcagtatcatcggtgtctgtattattattaatattattatgatgaatataatgattatcatttaaaaggtttaaattcccaaaattattattaatatcattgttattattaattagattattgttattattattaaatacataatcctcatcatcagaatctaaattaattacttcatttgcatcataataatgaagttttttagctaacatttgaatattagaagaaccatttgataataaacgttgtcttttcctgttattattattattattattattgttgatattattattattgatattattagtattattatttgcatcattatcattaggagatgcttgcagttgtattgaatgttgttgccatcatttttaatattagtattaatataaaaatctatcccttaaagataagataaaatgataagacttagataagataagatttaagagataattggagggcaatagaaggttgagtatgaaagaagcagtatcacctagtaatttcaagtgtataatagtgaattaaatgtgcagtataagtgtatataattaaagataaggatggcaaattaatataatcttaacttattattattattattattattattattattattattataatcatgtaccagagataaaggcatgtgtttaatcattttaatttattattttattagtggtgcacagatttattgtattttcaatttttttcattgacaccgccacaattgaagatttatttggagggtatttactatgctttatcttggaagcaaggacaaggacaaggacatatcatgatggacagtaatggacccgtattggatggtgtgctatcatcggttgatgtctccctagaggagcctcttcctgtagttgataataataataataataataatattcctaaatcagaagaagctatttctatgacaaatacagcagatcaatcacagatacaatcagagatacctatacaatcatcaatagataaaaagaaaaaatatatttgtgaaatttgtaaaattgcttcatttacaaggaaacataatttaaaatctcatttattaactcatacagattcaaaacctttccaatgttcttattgttcatcaaattttagaagaaattatgatttgaaaagacatgaaaaaattcatacaaaggaaaaaccttatatttgtttaaaatgtggtaaatcattttcaagagctgatactttattaagacataattcttcaaatactggttgtaatttaaataataataataataataataataataataataataataaatcaataacaaatgataataataatgataataataataatactaaaaagaggaaacctcgttcaaagacatcaatcaaatctttgaaaaaacaaaaaagaatagatgataatcaaattaataaggatataaccactttaattccattaaatgatgaaactaatttctttgcacaacattcaatagagaataataataataataataataataataataataataataataataatacttctacttctacttcttctactaccacaataccatcaaattttgaagaaatagttaaaatatcaagtttaattaatgaagttgtatctaaaagttcaaatgattctaatggtataaatgaatcattaactgaaggtcaatcaataattttgaaaaaagctttaacacttttaggtgatatagagactcgattgaagaaacctgaaacagaattagattcacaatcaacagaacctcaattacaacctgtacattctgaacaacttgaaataacgaaaaatcaattagatcaacaacaatctcatattcaaacagcattagataatatgaatgattcaatacaacctgaactcattaactgatattccgctttttgtatttactgtacaataatatataaatgtatttttatcaatgttatatataactaactattaacaaatttttctatctatctatctatctatttatttatctatttacacgaatttattatacaaaaataaaagctttaactaataaaaattattttttattctcttcttcatcagttggtaaacctaaatctctccaatcaactttatccattaattcattatccattctacattttaaatattttttagctaaaattctacaatttggtgcattttcattattaactaattttaaacatttcatatattttgtcatttcttccttacaatcaccaaaatgatctaatgggaatgaacctctctcaggtggtgtagttcttaatgctttaatagaattccccggatttgctgacattaattaagttgtaaggggtatattcagctgtttgtctacaagttaaagaaccagtcttgaagaactgcttataatgacttgatttgattttaatgtaatacattacgtaatatattctattacgtaatcataataaatctagtataatttccggaataccttgattttcgacaagacgtaattctgtataattatagttttaatatttacttgtcgtaaacaaggtagtgattaatttgtaataataattcttgataaataataaaataatggttgcttaatttgcatataggataaacaattactttagcgacgcgtctcatgggatcttaatcagaataccatatcattactattactattactattactattactattaacacaataactaccactaataaccccataaagtgaattgaccgtgttaatacccttactatgaatgattcaactgtcaatgcactatatgtctattactattactattactaatataaatctccgagacttaccccattaggcattgattccgacacttggggcgctcttattactgaaaacgggtaataaattattaaatttttttttctccatcactagattttcttatcaacgtttatctatttaaatgatggtattctttatttatttcaattcaattaaggggacatatatattaataaatatatatatataaatatatatattatattataggtcatatattatatcagaatatattacaagacaaaaatgactggtaatagtaataatatagataatatttcaattgattcaaatcatgaaattcaatcttatcatcaaaaaaatgaatcattagaaattgattcaatacaccccatagatgatcttgaaaaaaataataattataataatgataatgataatgataatgataatgataatgataatgataatgataatgataatgataattataatgctaattataatgatgatgattttacaaaacctttatcaagaattgaatcaattaaatcaattagagatgaaatacctgataaattttcaggttgggggttaacttcagttattggttgtgcatttttcaattttaatacttggggtgcaaattctgcttattcattatatttacaagcttatttaagagataatatatttgatggtgcaaataaatattcttatgcaattattggtggtttaacttttagttcaggtttaataatgtctccatttattaattatttagttggtataattggtgttaaaccagttatattaattggtataataattaattttattgcttatatgttagcatcttattcaactaaactttgggaaatttattgtactcaaggtgttttggcaggtattggtatgggattaatttgtgtcgcaaatattggtattgtacctcaatggtttaaaggtggtccaggtggtaaacgtaatttagcaatgggatttcaagctgctggttcaggtattggtggtattgtttataatattggtttacaaccagttttaaaaaataaatcttttagatggtcattaagagctcaagcaattatgtgtattggattaaatttaatttcattattattagttaaaacaagaaatgataaaattaaacctgtttataaagtttatgataaattaatttggaaaaattttggttgtctttgtttacttatttggattatgtttacattatttggttatgttgttctattatataatttaggtgattttacaagatcattaggttatacacaacaacaagcatcagttgtttcaacaatggtttcagttggtgttatttatggtagacctttatgtggtcaagttggtgatataattggtcccgttaatgttacaatttgtgcttcttggttagttgctcttttcagttgggcaatgtggataccttgtagaaattatgcaactgcaattgtttttgcaatgtttgcaggttcttataatgggtacaatttggttaacaatgtcaagtattaatgcttcaattgttggtttaagaaagtttggtgttgcaatggcattaagttggatttcagttgcttatttggttttgcatctccaattattggtattgcattaaagaaagatggaccacaaaatccaactcaatatcaacctgcatcaatttttgttggtttatgttattttatggcaggtttaactttaggttattgttagatcatggttaatttcaagaaataaaaagcctaaccctgaaaaagatactgaagatgatttattagaaattaatgttacttttaaagaagttatatcaaatctttttgcttatggtaaagtttgatatgtattttgtataaatatatatatatctttaagtaaatttgtatttattataagctattaaaaattttatatagagagcaaagaaccattgttaaaagaaccataatgtagtgaaaataaaagaactgaaatgtagaacaaaagaataagatatataagaactaaaaaaaaaacatgaaaaaccataacaccaactactgtatattactattatacaacacttaaaaccaagaagcaaacttatctgcaatatatttttcagtatctttatattgttgatgataatcaatacctttaatataatcaataccttgctttgtaccatcaactatcactttaccagttaaatcaacacctttcaaagttttaggcataagcttccttagtatattcattttggaaaacttcaccaacttttttaaacccctttgaagcataatcaacacctttattcaattcttctttggtcattttttgggacagataattaacacctttctttgaagccaccaataacataatcattaactacactatttaaagtatctttggaagaatctgcaaaatttttaattgatttagaaaatgataataaaaataaatgatccttttgagtatgtaaaattgattcaacattccatttacaaaattttgcatcttgatcaataattgaaatatattcaactaaacatttatccatattaggacgttttataataacaattatctaaaatattttgacaattttgataaattaaattacatttttcttcatgtttaacagtaaatacctggattatttggaagtccaaaaaatggataagttttagtttcaatcaaaaaatcataataaccatattttaaagttgaaaataatctcgatgaaaaatcaattgataaaagtaataatgcgattcctaatgatgcttgtatgaattcatatattgaaggatgtgaatttatgaaaattttcaattctttagcaaatggataagacttatttcgatttactagaattactagatcttcttgatttagttctactagttgattgagtaaggtctttcaaaagtattttcataatcagtttcaacaccagatgtgtaattatcagtttcataatcagtttcaacaccagaagtataagttatccgtagtataatcagtttctacaccagatgtgtaaattgtctgatataaaatcagtttcaactccagaagtgtaagcatcagttgtttcataaatatcctcctttttatcaactttatcattaattttattaacgccatcttgtttagcttcatcagtttctaattgatcaattatattccattccgtaagacctggactttcacttgattgtcttgagctgtttgtatttctagccatttgttaattacttgattaaatcgtataaagaaagcaatctttacctaaatatagaattgaatttaattggatcaaatctttaactaagtttaattaataaagaattattccgtaaagagggttaaaataattaattttttaatttttttttattaatttaatttatttgttacgtaatacaatagattagatagattagattataagatgagattacgtaaatctcggagttgataatataacaacaccgagatagtagtaatagtaatagtaatagaaatggaaattagaattaatggttttatttattatacaatataaactttaatcatccttttgaatctctaaccatggatcaagactttgtccaaaatactccgttaaaaatgtaccatattttgttgtaactgaagataattctgatttaaaccatacatggaatgattctaattctatcataacatctctattaataatttttaaatcattacgtaaaatttgttcctgtttctcaagttgaaacattctaatctttaaattataaaatttggttcttcttgtctcatctggatttggatcattaacatatttaagtattatattattaagtttattaactcctggaattttaccatacattgtcttcttacatgatttactgtataatgcactttgtaattcttcatcagtaattggtggttcactaaactcatctgaatttcttgttgatcgactttcatcactatcattctcattctcattatttttattactattattatcattgatttcattcgttacgccattatttctaccattttgtgatttatgtaatgcattctcagttttttgatcaattttcctaatcctaatctcctcagtttcatatcttttatatcttgatcgggtattatataattctttttcaattaatttaaattgaataatttttttcctattatattccattaattctttacatgttgtactaaaattctttaattcaataagtttatctaaaaatccaacattaattgaattacctaaacttgataaaagtattgtatgtctttcaaataatttgccaatttgttcaattttattagaatcttgcaataatgataattgattatacattgatcctaaatcagataaatcatttgataaactactaatgtttttcaatatccttttatttattttcgttatattatttaaaaccatttcatatttaataaattttgtttcaaagctaacaaatttttgaaattgttcctcatccgctaattctttaaataaatgtgaatctgatgataatggtatcggtaatgttaaatataattgattttcaagattatttaatggatcaattggtgaaagttggaaaatcgatgtcttataaaatgtatgattttcattatcattaacataatccataaaatttatttcaggatcaagaaaatgtaagaaaaatttactcttcactaataactttaattttcatacattttttcaaaaattctgataacattctcttcctataatcaactaaattaattattggatctgattcataccttcttaaaaatccatcatctttatgttcactatcaattgagttacttgaaagtccattacttagaatgatgtttcatttttattatgatcagatatattatttgaaaatgttgaagttgcaaatcccaatgaattggatgttgtaaatgcaatatttgattttaatgattgtttctcaggaattggtggaataattaatgtcgggaattgtttaataagacacgttcttaaagattcaaattcactataacgtctcttaactgatataattccaaatttaataaaatatacaataaatccttgtaaattatgaccatgaacatcattagatttacttgcttctgtaatttcaataactaaatcatcaccaccttctttaataatatcagcaattctattatttgaatgatttaattcttttttagtaattaatgatacctcagaacagaatccattggtgttatgattatcagcaattgtatctatgcctgcgccgccggagatttcaacagcattttcatcatcagttgggaagtttgtcgttgcgggagtttcaggagatgactctctatctgtacttgaagcggtaagagtagtcattactgtttaattgaaagcaggagaggagaggatggcaaaagaaagagggaagaacaagacagattaaaagaaaggtaacgtaaactgaaacaccgtctatgagctgagcattgtttttttctcgacatgaatttgttaatgttgatctgaggcctggagtattttgggtttttataaacagtaatatacttttgataactagggatttaagatgagtgagtatcacgactcctttgtagtgtctatggacagtatcatcaatgtatggaaagtagtggaatatacatcattggcgtttttgctcactttgaatttatccaatcctgtcgccaaaatagctttagctttacatattggcttacaaacaatgttactactagcttattctcccattgtatatcataagagtttatcaaatcatatgggattagaggaagatggatcaattagtaataaggggatattacagaaaattattggatttgttccaaatttaatgtataatatttcaacaataatattacgtagtttgatgttctttacaaaacaattaggatttaattttggtattgaaaaatcaaatttaaatattaaagcttttagtgctgttatgacatatctgtttattacatttagaaaaatgattgcattattgattgcattttatattacattagaggatgatgattcaactcatactaaaggatttacaattttcgcaattttcacatttatgcaaatgaaatttattaatgattcaactataaagaaattcaatcataataatgtatcaactgattccttaaagaatgcatttgttaaactatatagtgctgttacattatctaagattacaaatgataaatcaaaatctaaaattggtagaaatttagttgaattaattcgttcaagattattccgtgttttcataatatttgcattattttttgtttattacacattcagcagtattcttgaaacacctgatgatgatctaatttggagattgaatgttaaaagtttattgattttagattcacttttcgttacgtcactttctgctgaaatgttagatttaagtttatcctttaaattgaagaataactcaattgtttgataaaaagtttgaattgtacatatagtagagagagaaagagacggaaagaaagtgaaatacaaaaaagaaccctatatagaatgtatgtaccaaaataatgtaccatataatattgtcaataccaaagatgcatttaaaataaatgatttccaatctttatttctttcaatatcccaatctaaaacaatatattcaaatactgtattgaatttatttgaatttttttgatttaaatgtgacatatccatagatttaatatcttttctgaataagtttaaaattaactttttcaatttaagaacatatttttgaaatactgtatgatatctaataccataatcaatcttaacagtacataaaaatatccataaaattgacattattaaaataatatgataatgaatcaatggttgataaggatttggtaaataacataaatgtgtaattgcagttttagaatcaacagttttaccttcaacattacttatttcccatttattattagaatcattttcttcaagaggattccacaaacttaataattgaattgcaggtttacttataccaccagtcattgctgaacttttgactgtaacttcatcacaataatgagatccaggtattgtatcctttttaaattcataatcaattggttctttactaaatgatttaccataaggatgacgaatatgacaataatcatgatcatcacctgaaaaaattaatgaaggtttaattgtattaattattctttgacttatctcatattcaataactgtttgatattgtttacctctaataacagggaatggtttctgtgattctctatgaacatcacaagtttgtaattctgtaaatctatataatggaacatgtgaaattaaaatttttggtaatttatgataaggattatttggatcttcaaaacttgttaaaaattctttacttaccttattaattttttcatcttcagtacatgataatgaaacagtatccattaaaactaatgaatggttaccaattgtaacaacttcatctgcattaccaaaaaatcctttaaatcttgaatatttctcaaatgaaattccattaccaaatccaacatcatgattaccaggtacttgtctaaattgacgtataccatcaattggattgaaaactttattaaatctatgatattcatcgagccattgagtatcattccattctctaccaccatcaaataaatctccaacaaatataatactatcaggtttaaaatacttactataaagaatatgatttctgtgtaaataattatcacttaattgctttgtaataaataatgcaagactacttcgatctggatatgaaaaatcatcaactaattgaggatcaccaattataattgaatgataaggtttagtatttgaatcattccaagtttcccatttattccacatacatgatttcattgtataataaggttttaaacgttcaaaataatgaactgaacataatataattaatgaaattattgataactgtttccatctaattttttgaattaatttatcctttttagtcataactgaattatggtaatgatcattatcatcaaagttatagttgtaattataattaaaattttcgttatacccacttatattcagttgtttattgccagataaccgatttttaggtttgaatgacattacttatataaatagatgataaaaattaaattcaattgaaatgaaaacaaacgttagtaagattgctgaaataataaagtttcattttggcgaaaatattcaacgcggttgctgtttaccatttaatcaataacgacagtggtataaatactttcttttcaagacaatgggggatgaaccaccagttaaacgtcgaagaggacgtccagtaaggaatccatttgatgtatcaggtaatggagttaataatggattacatggattatcaggattagaaattacagcattaagaaaatcatttaatggtgataagaaatatgattttgaaaagtttttaaaagaatcagtaccggaacaatacacaattaatgtaattgatgataaagaagagagtgataggttgtttaaaggtgataattgtgtattgaaattgtttaaatatggagatgatgaaaaagatgatgaaaatttatcattaaatgatatgaaagagaggattgatatgagtaaatttgagattaatttaattgatcatgaaagaatcaagggacctgataaaaatataggtaaagttggaatcgatccattagatgatgcaagctataataagattcatgagaaattatccagaagggagaaaaaatttacaacatctgatagattgaaaatgttaaatgaagttgataattgtattgaattattatcaatattaggtacaggattaaaaaaatctgcattaaaggatatactgagtaattacgttgttgaaaatattgaactgagtgatgaacatatttataggctgagtcaattattaggtacaattacacatataaatgatccaacaaatacatatgaaatgatattaaaatataggttaacagttagagagattagatcatttttattaaattatttcaaagttaaaacattagaggatatgttaaagaaggaaattcgacgaatacaacaaattgataattatgatccatttattgaacctattacaaatgataatattgaagaattaaaggagataaggttaaaagatagagataagagaatgggtaagattgttacaattaaatttaaggaaaatgttgaattattgattgatccaattagtaaacctaaagttgttatacgtaagtaaacaaaaaaaaattgtttacatatcagcaagaatatcctttgcaattggatcattttctttcacagtttcaaaccatttagttaaatttgggtaagaatcagctgtaaggccaccaacaattgctccataaaatttataagatgtaaagaaataaacatcagcaaaagtaatataattagttgcaagaaatgatctagttgataattcattttcaacgaattttaattgatccttcattttagctgaaagtttagccttttcatcgtcagtttttgcaacaaagaaaaattgacctgcaatatctgctaaatcttgatttgcataagataaccatcttaaaacttgccttttatcctttaaattttcaccaatataagttttattatctgaaattgataagaaatattcagcaattgcaacaaattcagttaatttaaaattattttcttcctctaaataagcaggtgctttacctaatgggaaattagctttaaattcaggagtttcgttaaaaattttaacttcaatatctaaatttaaatgtttaattactaaaggtaaccaatttgatcttggagatcttggatgaatgtaaagggtacctaatgccattgttttgttgtaagaatagatgtttgaagatgaagatgattatatacagtaaggctgaagttttgaaaaatgcaacgtggaaatttgagagcttagtttttgagccactagaggttacgtaatcgtatagttactatactctacactatagctttaaaggaatcttatctatatcaatatcaatatctatataacactaaggattagcaatttcctttgcaattgcatcattttctttaacatcttcataccatttagttaaaactgggaaatcaactttaatttcaccaccaataacatcagagaagagaccataccatgaaaataaataaatatctgcaattgtaatataatcacctgcaatataaggtctagaagataattcattttctaaataagaaaattgagctctttgagcatcagaattaacttttttaatttcatcagttggtgaagcaaaaataaatttacaccaaacattaaccatatcttgattaatatatgataaccatcttaaaacttgtacattatccttaatatttttaggcttataagtttcattatttgaaattgaaatgaaatattcaataagtgcaacaaattcagttagtttataaccatcattttcataataagcaggtgttttacctaatgggaataattctttaaaattttcaacttcttcagaagattgaattttaatatctaaacctaaagctttgataattgaaactaaacaagtagatcttggtgattgtgggttaatgtaaagagtacctaatgacattgtgttaattgctaatataaaccaaaccaaatcaaaagaaaactaagagataaaattcataaactttaatcattaaggaaatcaaaggaagattctatagaaagaaactaaccgtacttaaccgatgccctttctctgcgtcggtgcgtcgcctgattttttatctatagaatttacttcttttaatttttgccactgttgatctggaggctctgaagtttctgaaggtggtgaaggtggtggtgaaggctctgatgcttttctgagtattcctctcttctttaatggtttatagagtagctctaccattacagtatgacgtcgggttatcagagaatatcattgatgccatatgtctcaatgcagttcatgtaattgatataattaatttatcattggttaataaacaaattaataaatttattaatgaaaataacaatatttggattaattattgtaaaaaattaggtatttggtgtaatggaaatgatgaaactaataatattattgacattattacaccattgaattgtcttgatataaagataaatgatcctttcatagctaaaaatacatttattaaaatttattctttattatcaccaattgttaaacaattactcatagataattatacaaatttccaaaatttaacaatttttaatacttataatacaccgaatattacaggctaaattattttcaaatattggtaattttattataattatgaatagatttaataattatgatagtttaataataagatttaatagtattataaatttatttattaattcaattataaatgaaattcaacttcaacttaaatttcaaaattattcaaatgttttatcacttataactgctttagattgtctaaatatatcaaatgaaagaattaatatagatcctttagattctttattagaattctttataagtaaatataatgatgattatattaatttattaactgataatttaagtaatgaatgtttccaatcagaaaataataataataatacctcacagaaacataaaagaggtatagtgaagggatattcatttagttttgaaaaagttgatgaaattttcaataatataacggaaatgttaaataatcagttaattgaaattgataatatttttaaaagttcagataaaaatcttaatagaagtattgatgaaataccaattatacttaaagttttggaaaacttcttaagtaattatttaattggtggattaattgataaaattatattcaaatctaaacaaattgattcatatgatgatggattaataattaaagaaaaagtagtaggtgatggacagtcaaaagaagaagggatagagaacattgataatgataataataataataataatgataataacgataatgataatgatttaaagatcaatttaattaatgaaacatcattattttttcaatgtgtcccatatttacactataaactaattaaaatgttagaaaattttaaaatatcctgaaaactgaaattttattagaatctaatgaaacaattaatatgaattatattaaagtatcagtgtgaatttattaattattattatgaacaatatttaattgaatttcagtattgaattaccacgtaaatgtcatcaatcattaattcaattaattcaatcatggaaatctgataatcaaaaatttcaaaaaaatattgaatttgaaattttaaaattagttattaatgatgataatgaaaataataataaaaaatcaaattatgaaataattaatacatttacaaatctatttacatttaataataaacaaaaggaaattaaggatgaacctgaaaataatgaaaataaattaactaaaatggaagcaaaattaaagattttatcagctaaagttgaatcattgaaaaatttaattagtcttgatttaacaattttattattacaacatattaaaaatagttatgatttattaattggattaactgaatattcaattacagtacaattaaagaaacaaattaatgaaacatgtcaaaatattttcagtgaatttcttaatatattaatcaatcaacatattaaacccggatttcaagaagcattaaatagattaaatgattataaaccaattgaacaagaggaaggattaattgaacctgttaataaatttattgaattagttgaagttggtgatttaattttacaaatgattgatgttttctataaaaatgaattaattaataatggaattataagtaatggaggttcaaaagattttcttaaaatgaatggaattgaaaaatcaattaaattatttgaaaatatattagatacttatgttgcaaatggtttagatatttcaattaatataattgttaatgaaattaaatttaaaattgagaataaattaggtggtttagaattattaccacaatctcaatcatctaataaaagttttagtacaattgaaaatgggaataatgatactaatgatgacaatatggtttataatttgaaatttaatgaacaattaagattaaatacaggattaatgagtgaatggacagaaatttatattaatgttttaaataatcattttaaattattacaagaaagtattgaaaaatcaattatggaagttttcaaacaagaattaggtgaaagattaattatttatttaattaaattaattttaaaaaaatttaaaatttcagttattggtggtatacaatttaattatgatattaataaattatatgaattttataaaattaataaaattaaacctgcaattgattatttaattggatttaaaaaaattaatcaattatatttaattgattgtttaattgataataaaaataataaagaaataaagttacattgtaaagaattggggaaattaataattgaaattggtagagataatggaattttcacacctgaagaagtttatcaatttgtttcacgtaggagtgattggtataaaattaagaaaaatattgataaagttgtttatggatttggtgctgatgattgtataattatgtagtatgaataagataagattttcattaataatataaaagtgtataaaggaatagaatataatagtaaggggtcattaaacagcagggggttttgaaaaaagcaagaataatataagaagtgttttaatttaatagtaggataataaatctaattcaatattatctaaatctattttatcattattaattgtaattggttcaagtaaattaagtgaatgatttggtgaatgtaattgagatactggttgagaaattgttttcgatgatgaagtatctgagtataattcaggtaataaatcaggtgttgaagatgttgataatgttgaagttaaatttaaattagttgatgatttaggtaatttaagtatttcatttgaataaaggaagactaaatcgaaactattttgaaataatgtaaaatttttataatatgaattataattaatattttcattaatgaaaaattcttttaaatcttcgatagtggtattattagtattttcagctgacttgaatttttgcactaaaatttttaaatcattaatcatacctgggaataatttgtttttaaatgatttcatattaagtatatttatcaatgattcattaaatttaatatttgaatcaaaatctaataataaattgaaaataatttttgtgtcattataattgataattgttaataacttattaaataaatttgaataaagatttgataatttaataattaattgattatttgaagttgaaatgaaatgatgagaatatgataatttatttaagaatattagtataaattcaagtgaaaatttaatgaaaattggtgaaattgatagatcaatattttcaattgaattatagaatgataaaatattattaaataataattcagtattattattaataaatgattgattttgaaataaattaatacataattcaataaattcaaatgcgggatctaaatattttgaattaaatttatttttcttcagattaagtaagttaaatttccaatttgaaagtgaattaataagtaagttttgattgtcattattttcattaaaattgtcattaaaggtaaaattattcattaatttattcaacaatgatgaaatattaagtaaattaccaagaaatgtatttgataattttaactgttttaaattaaaatctaacggttgatcccaaggtaaatttaatcttaatgaataaaaattacctaaaatgaatataatagcatataaattgatttctaggttattttgatcaaattgattatttttatttgaaatagattgaataaatttttttgaaatagataaccattgaaagaaacaagtatctaaatcatcatcagaatctaaattatttatattaattttgattggaaaataagataataaaacaattgaataaatagtatttaaattattttctttattatcatcaccaatattatgagaattagatgtaaaataaagtatctctttaagaatgaaattattaaagatatctatattatcagaaataatgaaaactattgaccaaaatagaagatgattgttagcaagtaaaaaagttggattattaaaaattttaatatcaaatattggaataagtggtagataatgatttttgaaaatttcaaagaaagagttaatctcatctgatgtatagcaacaaatatcgaataatttataatttgaaggtgaaatatcaggtgatgaaggtattatgttttttatatcaatatcattaaaatcatttgattcaggtatgtcattaacttcattaatttcatctatatcagttaaggtagttatattattattataattataatttttaatatcaattaaaccatcaactttaacacctttttcaatacataaatttttcaatttttgatctttaataattaaatcattaactaaattttttaaaattttaatatcatttgataaatttttaataatatttgaacgtttaacaggtataactaattctaaatgacaatttaaacctctctttgaacaagaagtacaaggatttggattagtttcaatataattacatttagttttatgtttcctacaacgagaacaagatttaagatgttttggttttgaatctatagttgagatattattattattaatattatttgaatttatatgaatcttattgggtatttgaggtttaaagggtgacatgatgaaaattgatcttaatcttgtgaataaagagggtgaagatagataaagatcgatgaagatcgataaggaaagatgaaggtagataatgataaagataataaaaacagattttaaagaaagggggatcttctttctatctattctcttaactgaattcttttaactaaacggttgtatatatttaggatatagaataaattcaataatttgaaattgaaacgaaattatttgatcggtccgcgaaattaaaattcactcaaaaaaaaaaaaaaaaattaattttgggaaagaaactgccggataaagaacgtttaatcggaatccgttttgtatttatatctgaaaatattctaaaataatttaaaatattaatatacggaatccgaataaataataatttcccaccccctttaagttattttaagcggggtaaatcatttgtatatcttagatggactaaagggatctctatcttattaacccggggtatcattataattattactataattgatctcattcactacatttatcttaatttaataggtgaaattaaatgggggaaataacctgatatttatactagtctatttaatttaatttaatttaattatcttataataaataaataattgtaaactccgtgtattatgtaataattgaataaataattaaccacccattttattacctaattcaatttctaaattacgtaatgcttcattggtattactactagtattactattactattatctactacttcttcttcttcttcatcttcatcaccaccacatccacaatcataatcttctaatattgtactacaatcataaatttctttacctaaccttttattaacaatattgtgaactgaacacccccacattgatgcactctttctattacttgtctgtattggatatttctttaacatttccctaaaatgttctccacattctccacatggatataatatactaaataatctaataaattcccttaaatcttcctcttgttctaaagttggattatctgggaatcttgataacattgtatgtaataatctccatgatgatttacctaattctgctcttgcttcctctgatggcatctttggcataaatgatatgtctgttgttgattttgattttgattttaatttatctcttgatttacctttttctttagtaatatcattgattttattcatttcttcaatagttttattactattttgaaattgacttataaatattatagtcattattaaaataccaattattggtattatatgtcttattcctttcttcattattattgcctcttagtgtgtatataatatcctttactctactactaataagatataatccattccatcatcactataattattaaaattcatgctatcacataataacatgttttttctcactttaaaaattatctaataatcgtcatcgcgtcgtctatacgaaatttgacacctaattaattataaactagtcctatatatacgacactctcttttttaaacaaatggataacttagctcaatctgcgagattatctcatgcagcttcaatagcttcaagaaatagacctgttaataataataataaaaatcatgataataataacttacctcctccaactgtttcatctactttgaatactaccttccctataagcaaatcaaatataataacttcttcatcaaatgactcaaatgatgatgataatataataactaattataaaccaacttcttcaattacaataaaaaattttaaaattgattgttggaaatatccaatacttaatgaaaatgaaattaaaaattttgaaaaaatacttaatttcccaatacctgaaatgattttcggtaataataaaatatcaatatcaaataatgataaattcaatatatcatttaatgcattagatgcattaaaattagttaatcatgatgatttaattaaagtaagttattcaaatgattggattaataataaattaaagaataatattaataatataccaatgaatattcataatccatttaattggacttatgaaactttatataatggctcaataaatagtggaaataattggaaaattgatactaatgattcaattaaaataccaattgaaaaattatcaattaataataaaattaaatttttcattgatttacccctatttgaagatgaattagcagataatggtatatcatcattaaatgttaaaattagagtaatggataattgtttacttttattacaaagattattcattagagttgatgatgttttattaaaaattattgatacaagattatttattgattttattgataatttaattattaatgaacaaaaaattaaatttaataattataaagatatactcaatattgctaaattagaatcaaataatgatccgaaaaaattattaagagatattcaatggtgttgtgataatttaaatttaattgaatctaagagattgtatatgaatatttaattggcagaagctacccagtgaaatggtagactgtgcgtgggtcccccagtggaatcgccccagcgaaattggtgagtcacgtggaaattttcagtgccaaattttagaagttatgttacactgatttaaatgaaatttatcaatgattgattgaatcaatgtacaaatcatggaattttttttttctatataattttataactaaagtaaagtaaagtacaaataccattaaatgaacataacacgtcgatttttatcaactaattcaaatttgaaaaaattagcagttattggatcaggtccatcatcattttatacaattttacaaattttgaaaaaacaaccaaataattttcaaattgatatatttgagaaaaatccatcaccatttggattagttagatatggagttgcacctgatcatccagaagttaaaaattgtattgataaatttaatgaaattagtgaatttattaaaaccggtaaagttaaatattttggtaatgttgaaatttgtaaagatttatcattaaatgatttatataaaaattataatggtatactttatgcatatggatcatcaaatggtaataaagttgaatttccaggttcattacatcaaaatataattaattcatttgattttgttaattggtataatggtaatcataattacaaaaatgttattaaatcattgaaaggtattaaagatatttcaattattggtgcaggtaatgttgcaattgatattatacgtatattattaggagatgttaataaaagatggaaatccactgatatttctaatcatgcattagatattttaagggaaagtgatgttaaaaatgttaatgttattattagaagaggtattttggattctaaatttactaataaagaattaagagaattattagagatgagaaatgaaggtgttgaatttaaaggatggaataaagaagattttgatgaacaattaaagagtttagggaaattagatagagttaataaacgtagaattgatttattaaataaatataaagagaatggaaatggcaacaagggatggaaattaaattatttaagatcaccaattggtataatggttaaaccagatggtaatattaaggaattattagttaaagttagtaagatggttcataatgaagaaaatgataaacgggaatataaatcagatggtaaaatagagagtataccaagtgatttagttatattagcaacgggatataaatgtgaaccattaaatgaatttaaagaaattggtataccatttgagaatggtaaaataattaataataatggtaaaatagagaatattaagaattcatattgtgttggatgggtttcaaataattcacaaggtaatattaataatacagttaatgatagtatgaatgttgcagaaacgataattaatgatgaagaattaattaatgatgaaaataaggaaggtagaaaagagattgaaataattttaaaagataagaaacataaaattgttaaatgggaagattgggagaaaattcattcaattgagattgatcaaggtaataaagatggtaaaccatataataaattatcatttaatgaaatgttagaattagttaaataaataatactatataataaataaataaataagtagatataattgattcaggcttaatgatgttccttttcatgagataaatggaagtaatattctaaaccataaccaaggaagaggaaacctaaagcaaaatgtaagacagggctacctttatttctataagtttctctgtaaattgcaaatggagttcttggagtttcaacagttgcattacctcttggtaattttgaatagaaagcaacaatattttgcattctctttgcagcaggatttgaacctaaattagcaggagaagcaatctttggaggaattaaagaagtaagtgatcttctaaagatagtagacatggttgttctgtggagttgaagttaaacagatgttagttaaatcaagtactactacacttatattaaaacaatattttaacaaaatagggtatgtcgagtgaggaagtaatttttcattggttcacctgtgtaaatatgagaatggtgtacagctgtggagtttactcgtttaggaaatattaccagtctaacattaattatttaattaattttatttaattttaattaaaagttaattaacttattattaaatttactaaattgccccgttttagatccatttcacgtaaattacatccctaattaatttaaaagtgccccttttcaccgtaattaactatcaatcactatgattattcaatcttataaccccctttcaattattttaatataaaagaaacttattttcccactttccacaggctcacatttgatactccccataatttattttttatctttattctcttatctttgatcttctaataatacttctttcataaagtaagacacagatttccaatctctgctgtttcttggtttaaaatcaaaaaaaaaagagggctcatctaaagttttgattttctttttgaataattcattatctttaactttcatttgtttgtattttcacttatactaatatatctacatatatcagctttctgtctatctgtctccctgtctctctgtctttttccatctctctcattattattaaagcttggttgagccttgcattttgaattttattttccccttatctttccacattgatctgatttaacaaaatacttcaattttaagttccgtttcaatttcaatttcaatttctatttcaattttcaccgttttatttcaatttcagtttcaatttcgaatttttaatttccatttcagttcccctgtctttcagcaatcgcatttaaaaattagataaacgttttccatttccatactaaacgttattttatattaatattttctattttctattttctattttcctgtcaacaattagaaaagaaataaaaaaaatcattacagataattgaatcatatttttattattgttggaattataatgtcttcatttaattcaaaaaataaaaataaaaatatttcaaatatctgtaatattaaaagttcggttaacaatttcaataaaagtttcaaaaaaataaataatttattcaacaataatatcatagaaaataataataatatgaataccaataataataataataataataataataataataacaatagtaatattccaagaacaattaaagtttttgataataatttccataatacaattgataataattcaatgaattattcatttgatcatcttaatattaatacaactgcaacaaatattatcaataataatctagatttaacttataacaataatagaacatatttactacaaaataattataatcaatcattctcctcaattagttcatcaattgacgctttatctcctccaatttcaagagctggttctcctttgaaattcttatttgataagaaaaataataattataataataactataacatggattctggttctgcatcagtttctggtactagtacaactgcaacaactccaagtattgatgatcatttagatgcttttttaaactgtaatagattaatagattcagttttaagtgatgataattgtgataatgattataattataattctaacagtttaaacctaaataattatgattataataaatttaatatttcatcacattcaattgatatgttatcatcagaacaattatatgaaaatgctattacaattgatagtattggtttgaaaatcatcaatactaaaattaatactaattcatttaattataatttaaattttacttcatttagtcctgagaggtttaaacttatcaaagatttaagtaagaatgaaagtttagatgaatatttagttaattcaattttgaatttatttgaaacaactaatttggatttaaaacttgagttattcaagaaaattttccaaactaaggaagattcattcaatgtaaacactgcatcattgaataacgattggaatatttgttttaaatcaaatgagaatcttattgaattagtatcatcattagcaaataatgttaattcaaatacattagttttcgaattttataaacttatcattggagattttatcaaattattatctatagtcaaatacatgaatgaaattattataggtaataatcataatatacttgatgaatatcatgaaaggttaaacttaattcaatttaatagagagattagtgaattacaacgttccagtcttgttgaattaacattatcaaattataatcaacatcaataccaatatcaatatgatgaacataataatcacagtatactttatttgctttggaaaacagagaaacctcaattctgctatgaactgagatcactggtatcaaactaagttattatttacacgtacatattctgctttgcttctgctttatcttttaccgttatttttgtctttatcttcatatatttttatagttctaatataccccatagaaaaataggatcggtattatccactcagtaagtaatttttaaattttttttgtaccagttagtttctgatgctgatgagattcagaccttcttcttctgggcactgttcctttcttctgacaaccatatccagataatgcttgaacaatggctatataggaaagtaagtatataggcaaacaaatttattatgacttttcaaacaatatactaacaagattatagttaatgacatctaaaacatttcattattatgtacgaataattcatgcaatgatgaatgatttaccattaccaccacatcctactagaattaatagatcacaacgaaggacatatcaatcaagttatgtacctactaggaaacataaatggaatgcatatatgcaaatatggagacaagaaatgaaagatacatttcttttcaagaaataagaattgaatttattactatttattattattaatattatacaaaaaaaagagatgattatacagtatgtttagaatttagtctttgttaaattaaattcatcatttggattacggaatgatttagttgatgccattgttatattatcaggtaatgtaagtataacttttgaattattattatttgaaaagtctcccattataacattatcattataaaatcttaatttataacaatttctttgattatttataactttattaaattcccatgtaattgcatatggtccaattgatgttataattaatgttggttcaatttcattatttgtttcattaaatgttgcaattgaaaattgtaatgatttaccatatttacttttaataaatgcaatatgttcaggttttaattgtaatttccttggaattggtttttcacttatgctaaatgatctttcaaatcctaatttacctgtatttttaccattattaatcataacatcaattaataataaatatgttttacatgttgctaataaatatctaccattattggatgttgttaatcctaaaatttcatctcctaatgcaggtaataatgttttagcatttttacctaattcatcatataatctaatttcaccattcatacttgcaactgcaatatatcccttaccagtagtagaaatttgtttgaaattaatcttagttttataagttttcttatcattacttggtttaataatacctttagaaactcttggatcaatacgaaacattgtttgtgaacttaaacctaaaaatgtatcatcatttgataaattgctaaatttattattacttgtaaatgattcaatgttaagattattatccctatcagaatcttgaatattccaatcttcaacaattttaccatattctaaatcaatcttatgtaactgatttttagaattaaaatcttggacaatcattgttctatcattattcaaaagcatcatcttatctgcattaactgtcttcttagaattattatttaatgataaattattaattgatgtaataaattctattcctaaatcatcatcagttttgaaaactcccagtttattacctcttgaaataaatgctctatctgttttatcaccaattgctaatgctttgttcttaatatcatcgtcaaatccactatcttcatcttctgattcatcctctgaatcggagaatacaattgtctttttctttctaaaattatatgatcttttgtttacttcaggttcggattcaggttcttcttcctcttcttcattttcttcttcttccttatttatacctccattttggtcaacatccatcagatccagtgaatcgattaaatattcttcatcttttttactaacagcataagacatttcatttttagtttgccataataatctcataattgttatttgaaattcttcataagtttctctatcattgaatttaattagccaagtagttggaggtccatttgaaaaaacattgaataaaaatgatagttgttcaaatttaaatgttggatcaattgaatcttcaattaaacaattaatataattaatatcaagtaattcatcattaatctctaattcataaacccaattacttaattcgaaaagtttaacaattgatgtatctgattgaattttaaaagcttgtagttccatattatatttatatattgaacaactaaattgatcaatatacagtttaggagttgtagatgttaatgatgaaggtattattggtaatgtttcagatgcatcaacaaatttagcatcttcatcctcagaattccccgtatcattatcaaatgtaatattatttggtttactattattattttcattttcataatcactatcatcatcaacttcggattcaaattctacatcatctacaatatttctctttgatgattgtaataaatcttgaaaatttaatgcacttgaaattgatgatgtatttgcagaattcaaacaattattattaacttcgttactatcaacaataaattcttgaatatcatttatattgatatttgagcttgatttttgatattttctttcaaatttgtatttataaattgatgtcataaattgttcaattgtgtcaattggtacagttttatttattctatattcgaatgtatcaccataatcaccttccatatccctccaagaaattattttttcattatatctctcaaataagcaaatttttaaacttgaatcaattataaaagattttaaaatatttgaatcattttcgaaaaaattatcatttaaatcttcatcattatcttcatcatcacttaaagaatctgaatctgataaattacccttccaaacaattaattgatgattaaatggtttatttgtactacgaattgttaaaatcgtatcattatataaacattcattctctgattttggtgatgatggtgatctaacgagatacagttgacctgatggtataatatttgcatcatcagttggttgtgtgttttgattcttaaagaatcttttgacaatgttcattctctatatttatatctctgtgtgtatatctctgtatctatatctatatgatgtagttgttataagaaaagatagtataaaccttaacaaaatcaacgccacttttaaaataaaaacaggttatctctttaacagtgagaaaaatttatttatttttgatacatgatttttcactcagttttctgacatgtttcttttcctaattactttacatattatcttcttttaatggtaatggtgctgaatagtagtatattaagagtgtttggaaagagaggatttcatagagtgtcatattgtttaaaggatggaggtagaccaaatgattggaaactccccgatttagatgaacttcccggtggatttagaggtaaagtatataacaagaaagattggaatgaatatttattgaaaaacactaaaatcttagagaaggagcaaatggagaaagagaagaaattaatggagaagaggaaaccaccaacaggttggagaaagaaggaaggtttacctatttggatgaaaaataaatatgcattgatggaaaaggctagtaaaattgatttaagtaaagttaaaaaattaagtccaagtacagcaagtgcaataagaaaattacacgatgaatttccaaatgaattaagtactgataaattagctgaatttttcaaagtttcaccggttgcaatttctaaaatactaaaatctagatggaacccaactgataaagaacttgaaaaattacagcaaagatgggagaaaaatgttaatagacaaatgtctgagagattaatagagaacaaatttgaagaatttatagaagctacagagaagagattaaagatggagataccaccatttttcaagcaagaactataccaatattatttaaataatagtattgaaaaagtaagggaagattttgatgaattaaatgaagcaagaatcaataaggagaagataaaagatgaaaaagtatctaaatatttcaatgatattattgaatcacaaaagtaaatctatcaatctatctcaactttaagaatctaatttatgtcttaattcatcaagattatcatttaatatatcaagataattatatttttgaatttttgttgaatttcggcgacctacctgtatatgagaaattggctttttaaatagcatttcacgaggatgttcagaagtgacaacttctaaataatttctaaactgtttgatttggaaaagtaatgcattcatctctgagttacctgaactatagtttcctaatgatgaagaagatgacgataattgattatattccgttactttcaattgttttagattggttcttaaactttcgataccttttaccaatttagatgttgtatagttaactttttcattgatatctgaataagtattatgattcatatcaatatcagtattattattattattgttgatatttgtttcaatttctttaccatttttttctatagtaaaactagcttgatatgaacgtctctttgtatctcttttaaagtgttcatattctgattgtttggtttcttcaataataacatcatctgttgaaatattcctatcaatcaaagttttaccattatatgaaattttcattacatttgcatttttaaccctttgttgaagtgatttatgtaatattttaagtttattatatacaaaattatgtaattcaaatctattatttaaaattgtttgtaaatttggttgaataaagaatttgaatattagtaaaataattgtcgttattgataatgttgatctggagagtactttaataaatttgagtgcaggatgttgaacccttctcagcttaggcaatgaagattcctcaggaaatgcaattacgggtatcttcgacatgtgtaatcggttattgtcaaaagatacagaaggtaaagataactcgataaggaggactctcccactcaaatctactgataagtggaaagcagaacaattaataaagaaatggaaaatagattattacgtaatattgtacactttacaactataaatggtcaagtatcttcctgatgaacttctcagtcactgcatcacctctgttctcgtatgctatcactattaaattatctccatatacatccaaatcattttggatagaaggtactccagtattaggttctgttttaatgttattatcattttgttcattttgttcattagttttatccgtatcaacatccatttcatctgattcaaatttagattcctggataaatccaaagaaattggattcttgttgttgactagaaacagtttccttgtctggtttaataaaacttccagtagattctaatggtgatccaacattgtaattctttataactattggatctggactcttgttaaatattaaattattctgtgatagttcatataatgaattactactattaatgaatgataatgcattaggccaaacagtttgaattgattctccaattatccatttacaatatgtaactagtaaaaatgtagttgtctcataacataattcttcatttaaatttgtctccttcaataattcacgtaattcacttaaaactgtatcaatacctaatttatcaccaagcatatatgaccataatttcgataaactaaaatcataattatgactataaatatcattttgatttgtaccattatttccgtaattgttattattatcattattattattattatcattgctattatttgatctatctgtctttgatataaatgttattaagttggaaaccatttccctcattggtaaatcttttaatggaataatgttcgatttaccaatttgtaaactcgtatcatcatcaatcgtattcttatccttataaaaatctgggaaaaatttattaactttttcataagttgattctttgatcatttttattagaattttaatatcaatactttcattttgtttaactgttattaactttttcaaaacactatctaaaattaaatccattttttcacctttgttcatccatttaatttgacataatgaatcaattacataataaacccatccaactaagaatttctcatgtaaatattctaaaccacatgttaatgcattagtcatcaatccatccaataaaattacaagtaattgcttcataaattacaactggaattaattgtgaatattcaagaggtgtgctcaatttgatcaaatcatctgatataccttcaacattatttgtatcaaataatgataaaatccacttattaacagtttcatcagaaacttcaacttgagtcgcaggattctctgatggtttactgttattatcataactatttttatcaatttgttctttatcaataattgttttcatatttttcaaaagtgcaatagtattctcatatggataataatcctctctactttgtaatagcaaattatatcttgatattatgaattgtgagaaaactaaaaatgttgataaatcacccaaaagatcttgagtatttgatgaatcatcagtaccaagatccaaatccatcattaaatctgattgattgttttcattgttgttgctgttattgttatttgtggcagtggttgttgcagtgttagaatttccattattgttattattattattattattattaatattattattattattagcttcaggtttttgagacacttgagtttcaagaaatttaaataacaataacaagatattatatggagattcagataataatattatatctagaatttcaaaattgattgagcatgaaattaataatctacgtaattttcaatgtttcacctgttataaaaaatgaatcaattgtttcattaactaaatcgctgaatttttgcttcaaaatgatagatttactaacatcatttaataaatcaattatacctatttcttcaatcgatgtaaattcatggattacattctagaattttatatgtaaaactttgattcaattcatcaattgttaacttattagtccttagttttcattatttatactatgtgggaggatggaatttaatgcaccaatatttaataagtctaattcaaccaaatgtttttcaaatgttaataaaatatcggtatgtttcaaaaaataattatattcatcagttaataatgatactatagttttttctaatttctgtttatttattttcaatacatgtttgaagaatattggaattttataagttaaataattcgtccaaataattttacttttattgtctgatgattgataagattcaaaaattccatttaaaagttctgttgcaaaatttaccatacaattcgatattggtatatctgataaatttactaattccataaatgatgttataaaattatcatcaagtttaacaaattcaactgtgaaatttttgtgaaaagccaaatacttttcttcaatcttaagacttttgaattttctctttcctttttgaccttacctttaagatttgttgatgattgaattctattaattgatgaaaatgagttggaattattgaaacctaatttaattgatgcgatattatagtcagacagatgtgattgtaataatctgaactatctaagaatttattcatatctaaccattctgagaattctgttattgaaactaatgaaatcattatctaatctaatcttttttgcatgaatgaatatttgagttaaaagtttcacaaatgaatgagataagactaattgaatcattatttgatttgtcaaaattagatgtcaaatatttacaatagttagataatgcattaagtacattaacattttcagcataggttttccatgggaatttatctgacaattgtttgatcaataaaagcagaacattctgatcatgagtggacaattgtaaataaatgaatgaaaaatagtttgtaaattcatcacatgtatttgataaatcagatctaactaagatttcgtaaacatattctctttgagtagaacttttttctaaatctttaaacaatactgaagaattgaatttttcatttgactgttgttgataaatatttttaaaatctttgtacaatttacagaacacagaaggtggtaagttctttgaaattgatattctaagtagattatcaaaagatgtaatacctgaagtgttcggtagtgttatagatgggtcagatgtcatatctttggtgatttatccatagattgtaaataaaacaagcatgcattcaataaacgtgtaaatgccattgcggaaaaacaactgttatgttgcataataaaaaaatatttgaaatattttatttccacaaagggtagggtagggtctttacattgattgtttatatacaaggttataaatgaatgattatcaatcaaccagggaactaggaacttaccccatgaaccaaaccagtactcaagaactgtatcacggacagatctaggtaatctagcaaaagcatctaatggaattggaatttcctctgctctttgtatacagagattataaccatcaatatcattttgatgtttaaacattgtagctaaattaatgaaacctaatttagcaattttagcagaattaaaattcatattagcatacatactagacacttgtgcagattctttagcaaattcaattgctttatcatattgtttattaaaccataataattcactaatttgtaaatttaataatggaattttttcaaatcttaattccattaatcttttctcattttcatttgataatgtctttttagttctttctatgaatatcgttagaattgaaatgtgaatctagttgatcaaattcattctctaatgatctaagatctgataataatatctttaaagattttttaatatattttggatctcttgtatcagaataaaatgaacaaatatctagtaatgcatttgttaaattattagaagagatttcatttgatggtactagtgtaatatcttcaatattatcatgttcatttttatattcatgatctataattaatttaattgattcaagatatttcttttcaactaattcaaaattttcatcatttgccttaaataaatctgcttgaattcttaatgctttactctttaatgaataagttgaaatttctttatctgtaaatttttcataatgataatcaaatcaaatgtatgatttattattttttgaacattaatatagttagattcttcacatgttaatgcatatcttaataataagtcacaataaactgatacataattttcatttttcattttaaaaaaccaagagtctaattcatctgttcctaacaaaatatcagaaatatttatattttcatcatcaatatcagtattatataaaataccattatctttagctaataattttaaacatttaaaataatttttatttgcatttgattcctctaattttatatattcatcaactaacccagttttaaaatcagtattgacagtaaatccaaatttccaacatgaaggttgtaaagtttcaagataaatgttagttaaaattgtaagcataacattgaaaacaaaatttaaaattgtgaaaataactaagaataagacaactctatatttccactgacttgaaccactttcctttaacatagttctaaagatttttatatttgtacccactttccaaaactctgcattactaataggtgatgtatgaaagtttctagcgtgaattttggatagaattgaagaatgtgaaactaaatttgaatttaaatctgaattaaatttaagcttggaatataaagtagtatttgtggaaaaattgggtattctatgaggtagtaaaggttttttcaaaaggggacgtaccctggagggtgatagtttgagatactgtgtcaataaagacattataattcactttgtctataaaaaggaaatgtataaataagttataaagttcaaaattatttatcatataaattattccatgtcgcaattatttgaatttttcacaatttgctatacaaagctttctttgcagtaatcgacatggatggatcgtttggtgctaagacataaacttttatgaatgtgcaattttataaactatttaagaaggctggtataaatactgatgaaactgatgataaccttgataaaatcaaaccaatttttgtaaccattgaaatcagaagatgaagaaattgattcaatgcttaaaatcatcattgattaccatttttattttgattatgaaatgataagaagaatagattcaggagctatgatgattgcaacatctgatattgaagatatctgtaaaattaatagtatcaaacctcttttgaaaatggttactaaatgttacaaattatttacgaataatatgttattaggtacatttaataaagatgaacttggagatattcaagctatttaagaatctaccgtcccttgttaattcatccttaagggtatttaattcatttagtttcagttaatattatcgatcactatttgtatagaagttgataacttaattattcagatttgagtaaataaaattaaattagtcgcttataaatgaaataaataattgattatgtaagctaaaatatataagttgaaactatcttagcctttggattccttaatagattgttatagttgtatctctgagatagtaatatctttcggtgttctataaaggacttctcaacaaagatcttcaatagacgtgtcaacgactagcggaatagggtatatttatataattttgctttcgggcgtttcattccttacttgcatttcccttatctgcaattccgaataatccccgatatcttgtgtagttgggttattatctttccaattaatggttgcctggttcttcatgtgaaacataatcacaccgaactgataattgaatcatccaatcgggttaaagagcccaaaactaattatccctatcattgctgatatcggagcaatcttggtcaaacatgtttcatgtatgcacccaacaattgatcatagttcgatagaaacttatggaaagagataagaccatatataacactttcctatcacggaaaactaatcccgataaattgcgaatcgcaacatttgtcaatcccaagatttccatgtagtgagtagtttcctcaattcaaaaacataaccgactttgtattatctaatcttaacattaatatactctctgaaaagaaaattcctattcgctaactttcaatacttcatgctcagctaattttcagctttttggtagcaacaagttttcttttcattatcggaatggagggattgattacacctaagacgcaatccttggtgaatgtacaattctatcaacaatgtagaaagattggtataacctcaattgaagatgataataacctcgataggattaaaccaatttttgttactattttatcagaaattttacaaccattaaaaggagaaaatgaaaaatttgattcaatgatcaaaaacgttattgatgacatctgttttacaagcgataagaaagatttagtggatgacgttaatgcgaagagaattgatgggattgagcctctattatcaatgattgatacatgtttccagttatttaagaataatgtattgctcgactcatttactgaaaatgaacttggaggtatttcacgctatttgtccacttttaaactttattatgatgatattaatgaaagaaagaatgatctttctaatgataactatgcacattatgaaataagtgaagcagagaccaataggaaagaactcaaggagaagtatgattatgatataattgaggaagaaatcgacattattggatgtatggtagatgagggtgataaaatggatatagatgatgagaaagaggaagaggaagcacaaggaaaaaagattcaaattgttgaaaatctttctaatcctaatattaaggaaaaagtaaataatttaattgcattagatcaaaaaaatttagaaaaactatttcaatgtgcatctgataaaaaaataaaatatgattttggacttttattgacttcaggaaaatttcgttttaaggattttaaagatatcagcaaagctattggtcagaagtttgatgttgaacaaatatttgaatggtctaaaaatgaatgggataaattaggtacaggtatcgattatgatgcatgttcatgtggttttacatcttatgttcttgatagaaagaatcaaactgattgtactaatcctgattgtaaagttgaagaaaggaaaagagttaagatgagatacgaaagtattcgttcacttcttgcgcatttgttcatcaacaagaaaacaaggaaaatcatgtatgaaactagagcaaagtatgccgatgacagtgatagtgttattagtggtaatggatttgccagatccaaggaaaaggaaaaacaaccaaatacgttctgttttaatttaggtattacaattgatggtattagtgaacatgaagaggtcaaattaaatgttgttgcaatgaatgttttagatctaccatccaaactccgtgattctgataaatatcaatttataccaacatattttgaaaataagttagataaacctgggaaactaaaagagattcttaaagtgttaatggctgatttgagtgatttatggaacgaaggtttcaaagttactgtggatggtgttgaatacacaatttttgctaatcttgttatatttacgggtgataatatgatgttgtcaaatgtattagaacttccaagtgtcagagaaccatttccatgtgtttgttgtaagattaagagagtgaataccaaggcaattgggaatccaatttcatttaaggatggaaaggaatattcactgaatacatcaaaagaattgtgtgaattagctgagagtggtaaattcattaataatggtgttgaattgggggttaaaagctgattttgcatttagaagaatcgataattttgattttatgaacgttattaccccaaatttgaaatatattgcactaagtgatatatttattcaaagaataattagaggaccatggtatgatccaaaatttgaagaatttgatgaagaatcgtttgtatctttaaatgataatattacatcaattattgaatacttaattgaagaacaatctttcaaagattatgacgatattttgagattatttgaatccaaaagttatttttatccaattaaaatggatgatattaaaacattattacatttattcccattacttgttaaggataatttgggtaaaaaggatagtatgcaatccaaaatacttgaattattagttgaacttagtcaacacttagctgttttcatgagtagtggagttccaagggatgatataccattattaaagaaaaattatatcaaattgatgagtgttattgatgaattaagtgaagaatatgaattcctaaggaaattaacaagcgtttcaaatcattatattattcacatgtttgacaaatgggatgatattggatcatttaaagatacattagattttaaattagagaaaatatgtaaagatgttaaagagttgacagattctagtgatttgatgatgaatatacttaacttaagagtaccagtaaaattatattctaatttaagagaaatcaataaaagttttgaggataacaaaaagggtgctaagaataatgcacttctatcaaattataaattttcaatgggagaaaaagttaggaaagcaaatatgcataaatatgataaactaattaatgcagctgccagtatatttaatgttaaaaaataatcgtgaattagttaaggtttatgaacatgataatattatgattaactcaaatgagttagtaattgattcatgtaaacgatttgctagatataggaaaccaggagaattagaatggaaatatattaatgtagagaagatattgatgtttaaatgtaataagtctactttgcgtaaaagtaaaaatggaaatgagaatttaattgattctgatgatgaatatgatgatgaatatgatatggcaaatattgatggaagatatgaaggtatagatggctttacaggagataatttacttataattaaatataataaaatgaaagttaaggagaaattgggttccatgtgtcagtgaagagatggaaaaatgtattaattttgaattgagtgatataagtcaaggaagtgggtatatgttattagatgatagacttgatattattccagtatgtggattaatggaacatggtaagatgatattagattgtcaacctgattataataacttattcagaagaaggaaactttaatacttatggtaatttgataaagatcccattagaatcatcgtcaaagatgttatttatctcattgttgaatggacaattttatattgtctgactatccttatttatctttatttatctttatttatctttattattccagaaactttaatgttaaagattacgtaatggcagtgtggtggctcaactattattattgacatgaaaatttcaataaaaaaaattatactgagccccacgtgtatttactttactgaaagtgaaagctatagtgtaagataaggtaaagtacttaaggttatcttcatcttcacatgcttttgaaatttgttatttgctttaacgtgtttgctttgtgtttttattgctaactgttattaactatctagtatttgccaactattgattttcacattctaaaaattattttaaatattaactctataaatactctcttgtatccccttttcaaaacaattactattcaatgtttctaatttattttactttcacttttacttttacttctatttccttctctaccttctgtaagcaatggaattcttaaatacttcatctttaaaagattcatttgtatccgcaactgataatatttattatccaaagtattcactttcaatcttatcaactcttattgtttttcttttagtcatatcaatttataattcatctgctaaaactttattattatttgcttatcattgttttattgccccatttactggtaaatcaaaggaaaaatcaaaaaattcaaatggccaacagtctgcattagaatctttttatgaaaatcaagctaatatttatgattcaaccagaactttccttttaaagggtagagaacaatctcttgaactagcagtctctcatttatctaaaaaaaaagatttagtttgggttgatgtaggtggtggtacaggttggaatgttgaatatatgaatacaatcttagatttatcgactcattttaaagcaatttatattattgatttatctccttccttattaaacattgccaaagaaagatttgataaattaaatattaaaaatgttcattgtatacttgaagatgcttgtactttccaaattccttatgactcaattgatttaattactttatcttattctttatcaatgattccaactttccattcaactattgatcatttgaataattatttacataaagatggtttgatttgttgtgttgattttggtgttcaatccgatcaaacaactattggtagagttaatactgttggtggtttaaaaaatagacatattccttgggtttttagaactttttggagaacttggtttgaggctgatagagtctttcttgatcctgcaagaagagattatttagaatatagatttggtactttaaaatctttgaatttatcaaataaagctttaggtaatataccttattatatttggttaggttgtgataaagatagatcacctgctcttttacatagagttaatgcattagcaactgaatccccctatttagctcctcaagatttaattgatactaataataataacaatgatttaaaaacaagtaaaggtcatgaagctgctattaataatcaaattagaaatttaccttatccttcattatactatcaagaagatatttatagagtttattatgatgaattaagaccagaatataatcaatttaataatcaatatatttatgccttcacttgggaagatccaagagaagatcataatatcttaaattttactaaggatgatgttgttttagcaatcacatctgctggtgataatgttttaagttatgcagctttaaaaaatcctccaagaagaattcattgtgttgatttaaatccttctcaaggtcatttgatggaattaaaattagcttcttttaaatctttatcaaaggatgaaatttggcaaatgtttggtatgggtaaaattaataattttactgatttattaattaacaaattatctcctcatatgtcctcaaatgctttccaatattggtatgaaaatggtgcaaaaacttttgatccaaatggtaaaggtctctatgatacaggtttctccaaatgggcgattagaatggcaagttatcttttctctttaactggtattaaaaaggatattgataatttatgtaatgctgaaacaatggatgaacaattgaaaatctggaattctaaaattaaaccaactttattaaatccaattcgtctctaaactattagttggtaatcctttatttctttggaaagctttaggtgttccagcaaatcaagcaagtttaatgggtccctcagttttaaaatatgtgaaagatacttttgaaccaatggttaatagatctttagtttcaactgataattatttctattatttatgtttacaaggtcattatgctaaaaataattgtcctgattacttgagtaataatgcatacaaatctttcactagaaaggaaaataatccattagataatattagaattcatactgactttcttaatgatgtctttgctcgtttaactactggttcaattacaattgctatcattatggatcatatggactggttctctaaagatggtattgatgctgatgctgaaatttctgctctttatcaagctttagctccaaatggtagagttaatgttaagatctgctgcttcaaaaccttggtatattgctaattttgaaaaaattggattcacttgtgaacctcatggtatcagaactccaactgaatcaattgatagagttaatatgtatgcttcaacttgggtttgtactaaaagatgtaaaaaaagaaatatgagtactttagaattatgattaattatgatgctacttcatttttcttgcttatatctttctttttatattttatatgatgaaatttttttgtatttttaacttttcaaattaatgtttaactgtgttttttattttaccgtagtcaagtcaaaatacaagaaattggcataaattaggtgaattacgttatatatttttttgctttcttttgtttttactttagtcaactatagtttggtgtatattatacaaatataacatttaaaactactggtttgacttacatacaacattatttataacatgttttttaaaaaatcaagtcacgtgactatatggcactagcggcccataaaacagcaaatttttaacgtcaataaggactggatggccaagttggttaaggcgtgcgactgttaatcgcaagatcgtgagttcaatcctcactctggtcgtttatttttttacttacaaataacttatttttttaatacacaataatccctattttttttaaatctatacttatttattatcaagtacgactttgaaagttgcaatttcaaatgatcttaattggaaactaaattcgttcggttcattaatttcaatttcttccttttcttcctctaataaattagttttgaaaacttttttaattggtaatccaatcttaattgttgaattactgataccacctagtgattcataaactctcaaaacaactgtttgataaccttcaaatttatttggcaatttatccatcattccatttttataatcaacatcaaaatcatcttcaccacgtttaatatttgataaaataatattttcatcacctgaaatattaactaaactatttaaattttccaataattttctcttttcacttgaaatatataacgcatttggcatacgttcattgaattcccaacctgaatgaattgtttcaacacttaatggtccattatgtggtaaaatttcatattcaaaggtatgatctccaatatctgccttttcatcaggatattttggagctcttaaaagtgataatgtcattgtattaccttgaactgatccaccatatttattattattaataattgaaataccataattaaaatcagaataatcaacaaatttatgcatacaacattcaaattttgcaacatcccaagttgtattgaaatgtgttggtcttttagttataccaaattgagtttcataacttgcaaaatcatttgaaatattaacagggaattgaaccttttaagaatttataagtttcattccatttaactttacatttaaatttaactgatgatttatcacttaattcatttaatccatttaatgaaataactgaaataattttactattatcagataatttatgttcaatctctaatgcactaactaatggtccattatatttaatttcacatttagctgatttttcaataaattcaaatttatttaatgaataaagttcagtatcccatgcagggaaaattcaatggtgtatctgaaaacattgtaaattgattaccacccttaatatgatttggtttaatatattctcttttattgattagatcatataaacttaaaattaaaccatttgaatcaataagtactctcaatttagaattttccaaacaaaatgttccatcatctaatttattaatacttgaaggatatttaactttacttaaaacaggtttcatcaatgttgaaccttgaaatttaacaaagtatttattatcattgccaacattagataccttctgtgaaatatttaaaagtgaatttggtaaattttcaacaatttcaactgaaattttttcccaaggtaacgagctcaatttaattaaatgtttatatttttcatccttagttgatgagatatcaaattgaattaatgcatctttcaataatttttcctcctttgaaataacttttgataacattggccaaacttcttcaccataaactttattaatacatgaacctggtaaaacatcatgaaattgacacaaacaaatatcttcccataatttttcaattttagctaatggatatttataattatctttctctaaaattgatgcaaaagttgcaaataattcaacattatgcattaataattcaacagttctcatatagctcttaacttttgcttgagttgtataagtacctctatgatattctaaatataattcacctctccatgaaggtaatttagttccaccattagtatcattatataaatcattgaaaaaatcatcaactgtacaacccatttcaatctgtgggaattcaccacctgcagtatcagcaaatccacgacatcttcttaatttttcaatcatttcaggtgttggaccaccaccaccatcacctttaccatacaatagcatacccttttgatcatcatataaattatgatgatttaaaacagttcttttaacatcaccaaaattagcagctgctgtataagtattatttggaggcatatgaactaaaacttgtgaacaatcaattccaacccaattaaatgaattttctgggaaaacattaatattattccaacttaacttttgtgttaaaaatttaggtatttcacataatctacaaatttgtggaatttgtgacgaataaccaaatgaatcaggcaaccaaaaaatatctgattttttaccaaataaattttggaaatatctttgaccaagtaaaaattgtcttactaaaccttcaccacttggtaaattagtatcattttcaacccatgaaccacctaatggtataaatctaccatcatctgctgcctttttaactttttcatataaatctggataataatcaattaaccatttaaaatgttgagccgctgaagcaacgaaaacatattcaggatatttttcaattaatcttaattgtgaagaccaacttcttgcaattttagttttagaagttttaaaatcccaaagccaagcagtatcaatatgacaattaccaattgcataagctgcattaaatttatttaattttttttcagtgtaaactttttctgaatcaacattattacctaaaaattcactagcaatttttctacatttatcaattgaattttcattatttgaatcaaatgaatccattatacgattacaaatttctcttgctttatgtttttgaggaccagaattttctctagcaacatcacttaaaacccaaaaatcataaaataaagctttagcttgatgattaaattgaactaattcacaaacacgtaaattataaacatcaccaccacctccaaacattgaattacaaccacattcgatgaaaaatgttgattccatataagtatcaggaaatttttttgaaattttgaaaaaatctaatggtaaaatacattcaattctttcaccttcacctgttaaaccttgtaatggacaaccattttgatcgaaaatcattgcttcacaacctgcatcaaataaaaaggttaaaacttcacctttttctttagatttccccttatcaacatcatcataccaagattttaaaattctaatatggattttcaaccaatgagaactccatttaggtgacattgaaattgtcttcttagggttaaatgtttcaaattcatcaagtttagaaggaataacttcattatataaaggttttgataatccaggtgctgaccatttatcaacccaaatacctgcttcatcacttttacttggtttacttgaattagctaatgttaaacgttctctattgtaaaattttggtaaatttaattcacgatattgaccttcatcaataaattgacgtaatctattttcataaattgaatcaactgttttaaatgttggagattcacgtaattgaggatatccattggatatatcgttcgtatgagtatgtgtattatgcggatgcattggttatacagtatatactcgtagaaaaaggaaaaaggagaaagaaacagtggcagcaaattgagcaaaattgtggggctaagcagtaaacaatacttagatataagtaatctcatgacatgacatgtcctttattaaataattaatttttacggagttgtcgctttgtaatattacgtaagctattatattaaatattctaacttctaaatagtagattgacttataaatggtatcattgattagcaagtattttttttaatattttaattctaagatatattttttatttattctattctttttttactttattttaaatgaaataggaaaacgaacgtgcaagaaagttaaagaaaataaacaactattagcaaaagacaaaataataatattgatcaaatcgatcaataaacaatcaatttaactaatagaagacaatattagcagaacctgaagtaacagtaacagtacaaccatcagatgatgataattgaccattaatatatgtacattcaccattaattgatgaaccttcagttgcttcaattctaatattataattagcagcatttttattatttggatttggaattaatgataaataagttaaaccattagttgagcctgaaccaataacaattggagcataattaccaacacctgcagctgctgtaccccaaatacaaccatcttcaacactaacacctgcattattaacataatattgagcagaagttttcttaccttgccacatataataagtatcttcatcaacaactgataaaggttgagttgaaccaccatttaattcaattggaacaaccatattttcagaacctggataatcagttctacaaagagaaacaacatcacttaattctgatttaacgaaaccagttgctaaatcattttcacataaagaatcagaattttgatttgatctataaaggaaaccacctttacataataaaccaccaactgatctaccatcacttggttgatttgaaggccattgagtttttgacataccagctttacaagcataggaacaatagaaaccatcggtacaagaatttgaagttgaaccatctaatgccataactgatgcccaaccacctaaaccgacccaatcaactgcaacaataccatcaactgaagggaattctgaacatggaattgtaccatcttggaaagaacctgaacctgattttaaggaagaagatttttcaactggagaagtagcagcagtagtttcagcagcggtggtagcagaagtagtttcatcagcagtagtttcagcagcggtggtagcagcagcagtagtagtttcagcagcagcagaagtagtagcagttgcacctaattcatcattattaactaaatctgcggttgtaacgacatcaagaactggttgagttggatttgcaccattaacgataactgtatgaacttcagttttagtaacaactgcagcttctcttttatgcatatgatgttgatgatttaagacaactggagcagcagagactaaagttgataaagttaagattgataaagcttgattaaatttcattttttataatttatttttagtatttttagatttgattttaattttaatttaattttaattttggtatcaataatttgtatttttttaaagaaagactataattcaattaggtttttagtttagtttagtttagtttattcgaaagaatgtaaaatagttggattactaaaaggaatgtgaggggagagttatttgtctgatgaaagaaggaaagaaatagagaggaaataaagaggaaataattaaaaggacagaagagtaaaaaagatcaaataataattttaaaaaaaggggaagtgaaaggagaagtaaaacgtaaaggggaaaatgaaggaaatggcagaatcggaaacgacgagaaacgtttaaaagtttcaaaagatgaaaagtaaataaataaagaagaattaaccgtttgccatgaaaaagagggtgggagatgctctccttttataagatttattaaaaggggtgttaatagagtaattagagtaattagagtataatgtttcggagacgtcagaaaagggagaattaattagattacctattataagtctggactctctcatttttttcttatttaagttcccctattgttctcaatgttgaaactgaaaaattttcattatagattattacccttttcgggtttaattagaaaatgattcgcgccttaactgtaattgtatttaaatattgtaattgtattggctaagcattgcccctttcattaattacccttttaggatatttaataatataatagtgagatgatttgatttgatttgatttgatttgatttgatcctataagccttcatgagggctcatctctttttgatgtttatctttatcttatcactttaattcctatttctttatatacaactactcacaagtatgagtaataatgtagatagtaaccctaatactaacaacagatcagtttcacctttaacaaattcttcttatctgtctaaaaattcacttttcagaatatcagatttaccagttcattgtacacctgatacatctattttaaatgcttctctattaatgaaaagaaaaggaactcattgtcttttaattattgatgaattatctggtaaattaattggattaacaacaactaaagatttagcatttaaggcaattgctaaaaatttaaatactttaaatacttcaatttcaattataatgactaaaaatccttattttgtatctcatttaacttcacctaatgatgctttaaaattaatggttgataataaaattagacatatgccaattgttgatgaaaatgaattagttattggtattttaaatataacaacttgtttctataatgcaatgattagattagaaaaattaaatgaaagagctaaaaatttacaatcaacttttaataatttaaataattttaataataataataataataataataataataataataataataataataataataataataataataataataataatagtaattttaacaacaataataatattgataatcaagaagactttaaagagaaaatcttaccttcaatcaaaattagagatcatacaaatcaattgaaaaataataaaaaattagatttgatttcacttaatgaagatttattagatttaaatataaacaacaaaaaaaacaaaattgtaaatgatttaaaaaaattaatttcaataatgaaacaaccagatctaaaatctttattaaatgataatgattttaatttaaaatcaaaaaaacctttactgataccttcaaatacatcaatttatgaatcttctcaattacttttatcaaataatgtaacatctgcattgattgttcacaataatactgataataaagaagacaataataatcactttattaatgaaactattctaaatgctaatgatatactcgggattttaacaacaaaagatttagtttatcgtgtacttgcatgtcaaatagatttaaattcttcttcagttgtaagaataatgactccaaaacctgaaatagcaatagaatcaatgtcaattaatcatgctttaagattaatgtatgaaggtaaatatttaaacttaccaattaaagattcaaataataatattgttgctttaattaacgttttagatttaacttatgctttaattaaaatcttaaatcagtcttctttacattctgataataagaataatttagaaactgctgataatattaaaagcaacaataaaaatagcaatagcaaccatcataataataatgtacccgcatggaataaattttgggattcattggatcgcccattaaataatcctctatcaaattctcatctatattcagttaataattcaagtaatgggtcaataaatttttctaaaagatcattctcagttgctgataaaccatcaaataaaataaaattaaatacttcattaaattcaaaaagatcattttcttatactaatttacccgaaagtactaactttaatgatctaaataattcttatgtaaatttacaaaatggtgatgattcagattcagatttttattcatttggtaaaaatgttaaatcatattattttaatgatccaattgaaaattcaaaacctgaattagaatcaaacttgaatatcaacaatactaatttagaaaatagaagattaataacaataaaattgaaaattaatgaattgattggtgttaatttgggatttaatgataagatctatttaacagaactagaatatgatgaaaatgtaatgtatgaatcaattatgtcttttatcaagaaaaagatacccattactgaagatatagttgtccatttaggttacttggataatgataatgattttattactattgaatcaatagaagatattaatattgctataaaacaatctaatgataataatttaagtatgattgttaaactgaaaaaagtaaactcagtgaatcctaactcatcattatcgtttattaaaaacttgtgtttcaaaagttttggtatggttaagaatttttataaaaaaaacgactttttttggggtggcgtaggattatttatgtttgtagttaccaaatatataattattgataaaaggatgtaatctatgacacatgtggataagaattgaccactactagttcttgctctcatgcatagaagtacgataatagagataactcgaactccgacgataagacgataataagaaaatccaattacgtaacacttaaaaaaaaaagtaaaaaaaatttcatcgatattccactaagtgtaaattcaagcttataaaagcatgaagtttaaaaaatgaatttttgcctttcaaatcattcattactaatgtttattctttcttttttattttgacaaagatgagtgttcaagatttcgatccagagagtcaatttggtgtaaaccttaaaacagaaattgcaaaccaattaacaggtgttgatgatcctgcatatgttgcagattatttattagttttgattaaaaataatagaagtcgtcctgaaattgttgcagaatttaatactttatttggttcaattattgatgaaaattttgttcaaaatgttataaatgaaatactaaaaaatcaaggtttaggtgatgtacaacctgtaccacaatctgcatttctacaacaagggcaagaacaacagcaagaacaacaagcacaacctcaacaagcacagcaaataacagaacaacaacaacaacaacaacaacaacctgttcaaccagtacaatcagcatttagtgatgtattaaattcatcaataaataataacatttcaaatgatgattcaaataaagaagtaaggttcagtgaaaatgttcaatctgcctttaatccaagtgatttctctagtaatagaagtcatgattctaataccaatatgagtaaatttaactttaataaaacaggaagaaatgttatgaattttaaaaatactaggggtaataatagtagaacaatgaacaatagaagacaaaataatatgtcaaaaatgattgaaatgtcattaaataataataacgaaatgacaactaattttacaggtactccaaatagaccaactgaaagatgtaaggatttcccacattgtgcaaataaaatatgcccaaatgctcatccaactagaatgtgtagggcattcccaaattgtccaaatcaaaatcaaacatgtacatttttacatcctggtgaagatgatgaattatttaaagaatatgaaagaatcagagatgcaaagagaaatatggcaaatgctccaaagaatacaggtatttcattatgtaaatttggttcagtttgtcaaaaagaattatgtccatttggccatccaacaccagcaaacaaggaagctaaagttacattattacaatggtgtgttgataataaacaatgtaaagatgttaattgttcaagagctcattcatcaccaaattatcaaccagctccaaaacctgttccaacaggaagttcatcatcatcatttacaccaaacaatcaagttgagaaaactttagaacaatgtaaatttggttcatactgtaagaattataaatgtccaaagagacatgctaaaagtcaagttatgtgcagagagggtgctaattgtacaagaattgattgtttctttcaacatccacttaatgaagtttgtagatttggtgttaattgtactaatgcaaattgtgcatttcaacatcctgatggtaaacaatttacaaacggtgcaactccaggtggtaataaagtttggattaatggtcaattacaagattctggtaatacatcacaacgtcaatttgcagttgatgaagatcaaattttagaacaggctccaccacaagaaatggcttgattaagattgtttattaaaaacaaatttcttatttttacatttcagtttcatgtattttaataactaaaaccaattgaattttcatttatattttactttattttactctattttactttattttatcttatctgattttactctttattattctaatttgtgtatcattttttttttctttttctttttttttttggattttttttggatttttttttgacattttgtataaattattgtgtataatacattaatagaactaatacaacaatgaaaataaaatacattataaaatccagagattacggaagataagtgtataaattaccaatgaattttaattaaataaagatttataaaaaataatagacaatgataaatagatttagacataaaagcatattaataaattaaactaaaaaattaattaaatttatttctttgcttcaacgtataagtctaatggagatggttgaattgcgtgttctttccataagtttggagttaagaaaccgtaagtgttaccaatagcagcgaaagcagcctttaaggtgttttcagcagttctggtagaacctgaagaagtagtgtaaatatcttcaatacctgcaaattgcatcatttgtttaacagttggtgaagcaacaataccggaacctcttggagctgggattaatctaacattaactgaaccacacttacctgaagttttgtttgcaatggtatgtggagcacctaaattagaaccccaataacctcttctaactggaataattgataatttagcaatgataatagcacctctaattgcattagctaattcctttgctgccttaacacctaaaccaacgtgaccattaccatcaccaataaccataacaaccttcattctagttctttgaccagctctggtttgtttttggacggaaataacagccataattttttcttgtaagtttggtaataatttatcaacaatttgatattccttaactggtaaagagtgagcatagatttgttccattgaagtaattttacctgatgctacaagtctacctaatttagtaactggaacccaagctttttcttcatcaccttgtctgttgtttcttcttggacctcttcttggacctctgttgttttgtggagctgcacctgacatttttatttgatttatttaattagaattcgtcggaatatagaacgtggaaatccggggttgttggttttcaatcgacgtagagaactctggggaaagaggtaaaatttaaaggaaaattagatagattaagattatttatcatcaagtgaaaaaatcatgggaaatattgaaaggttattgttcctcgctaaaaaaattgaaaagttagaaaactgagaaaaagagagtctttctggaaaaagagggttttatatcaataaaaagacctgagctgggtcacgtgaggtgcgttagcaatattacgtaataatgcatggaaaaattattaagatattccgattgtacaaagagagaagtcaataatattataaaaagccgttttacatcaaataaatttgacttctgccatagaggtttaaaaaattgactctctgacagtgtggtagttaccttaaatctgtgaagtcaaaatttcaatcatctattttacttcattagatttattatagtaaagttagtcatcttaaggcaccccatctttatttcttattatcgttattgagttcaattatctttggggctttgattaatcaacttattatcttgttaacgtattagcacttcggcgtattaacttttattagaaattttagtaataatttacgcgtttacacgtgacctcaacagtcgccgactctcacactaagtaattttcacattccattaatagttattagaatattgaatgactgattatttagtttttccacagtgtgtcatcatgaaattgaaatttattaaattaatttcatgaaaaatcaattaattaattcatcataattaatttgacttgttcgtttccttattgttttctattatataaactcttgtaattcccgtcttaatcctttttattaacttaattgactttatctgttatcttcactttaaaccaagacacataatcaattaaaacaatataaaatgtcagcacctcaaccaatctcaaatttaactcaagcttttgaaaaaactggtttatcttcatctccaagaaatacagtttcaacttctccaactacttcctatatggatcaatataaaccttcatcaaaggcaagtaaaactttaaaacctttttcaactggtgatgttaaaatcttacttttagaaaatgttaatcaaactgctttagatattttcggtcaacaaggttatcaagttgaattcttgaaaacttcattacctgaagaagaattaattgaaaaaattaaagatgttcacgcaattggtattagatcaaaaactagattaactgaaaatgtccttaaacatgctaaacatttagtcgctattggttgtttctgtattggtactaatcaagtcgatttagaatttgctgctaaaagtggtattgcagtctttaattccccattctcaaattcaagatctgttgcagaattaacaattgcggaaattatcgcattatcaagagaattaggtgatagaaatatggaattacataatggtttctggaataaaaaatctgcaagatgttgggaagttagaggtaaaactttaggtattgttggttatggtcatattggttctcaattatctgttttagctgaatctttaggtatgaatgttttatattatgatgttacaatgattatgtcattaggtaattctaaacaagttggttcattagctgaattattaaataattcagattttatttcccttcacgttcctgaaactccagatacaaaacaaatgatttcaactcctcaattagctgaaatgaaagacggtgcttatttaattaataattcaagaggtaccgttgttgatttacctgctttaattgatgctcttaaaatcggtaaattagctggtgcttgtatcgatgtttatccaaaggaaccaagagctaatggtcctcatttcaatggtgatgaattattaccttttattgatgaacttaaatctttaaaaaatgttatcttaactcctcatattggtggttcaactgaagaagctcaatctgctatcggtattgaagttggtactgtcttatcaaaatacttaaatgaaggtgcttcagttggtgcagttaatttcccagaagtttcattaagaccattagatttagatgaacaaaatgtttgtagaatcttatacattcatcataatgttccaggtgttttgaaaactgttaatcaaattttatctgattataatattgaaaaacaattctctgattcaagaggtgatattgcttatttaatggctgatgtctcaggtgttaatagtgatgatattaaaaacttatacactgaacttgaagctacaagttacaatatttcaactagattattatattagatcttcaattttgaaaaaaaagacatttcaacgatacattttttcccattcaactttcaattcttgttatctttcagatttattttggtttccctaacttacagctgtattcaactatttctcatttcagatggtgaattttattgaattttttacattttttcgataattacttttcctgcttttttaccttatactatattatactatactatattattttcatctttatatttatttactcctatatatatcatggatgaaacactttcaacataatgtttcatacccctaataaagtgcataaaatttatattaattgtcatcatctccctgtaaagtcgtaaattattacctaagctgtttaaaatttggtggtgtctcagtctctcaatattattacatcaagaaatatttcggtggcaaattggtgttaatgatcttttgactttaagaatctctcttttttctaatcatagagtgtcttagttaacatagagaaatgtctgtgattacctctgctgcaccatatttatccttactggatgagcaagatccttctctaaaagcttatgcattacaatcccttgataaacaagttgatcaattttggtctgaaattgcaaatagaatcaccgatattgaacaattattcgaagataatcatttcacccatagagaactagctgctttagttgcttctaaagtttattataatttaggtgattatgaatcagctgttaagtattctttgttagctggtaaaaccttcaatacaaatgaagattccaattttgctgaaacaatcgtctcaaaatgtatcgaatcatatattaaattatcacaatccagattttctgatgaaactgtcaaaattgataatcaattaacaaatatctttgaatcaatgttagctaaatgtgttaacgataatgaaattaaacttgcattaggtatttccttagaaagttatcgccttgatattgttaacgatattattaaaaagcagatcgaatcaaatgtatcatctgatgttataatgagttatatttcatatgttttgacatgttcaactactgtaattaatgatgttaacttcaaaaattcagctttacattcattgatctcaattttattcagtactgaaaagccagattattttttaattactaaaattattatccaattgaatgatgcaaagtatgctcataaagtctttaaacaattaatctcaaatgataacgcttcaatggcataccaagttgcatttgatttagtctccaccgcttcccaagaattaattacccttgcttcaaagtatcttaaatcagatgaagatatcgatcaatcatcatctgcagttgccaaattattgaaaattctttctggtattccatcatgtgatttagatttgaccttcctttctaagaatcgtaacattgatattaccattttaaatactactaaaaaggcattagatggtagaaattcactatatcattctgcagttacatttgctaatgcattcatgcattcaggtacaactgacgattcatttttcagagataatattgaatggctggggaaagctaatcattggtctaaattttctgcaacttctgcttttggtgtaattcataaaggtaatttatctcaaggtcgtaaagttttagaaccatatttaccaggtaatacatcaaatgctcacaccaatggtggttcattatatggtttaggtttagtctatgctggtcaacatactgaaattttaaaatatttacgtgatatcgttgaagaaaactcatcaagtgttgaaaacaaagatcatgatattatccttcatggtgcatgtttaggtattggtgctacagctatgggacttggtgataaagatgtatatgatgaattaaatgttatactttatgcagattctgcgatttctggtcaagctgctgctttagctatgggtttagttatgttaggtacttgtgatgagagtgctttgaatgatatgtttgtttatgcacaagaaactcaacatgaaactattattagaagtttggctgttggtatggctttaatttgttttggtaaagaaaataaagctgatgaatatatcgataaaatgttaaatagtaaagactcaattttacgttacggtgcttgttatacaattggtttagcatattgtggtacctccaataaacttgcaattaagaaattattacatgttgcagtttcagattcttctgataatgttagaagagttgctgttatgtgtttaggtttcgttttacttcgtgaatatactaaagtccctactgttgttgaattactttcacaatctcataatccatatgttcgttatggttctgctatggcattaggtatttcatgttcaggtcgtggtttaaagagtgctttggatgttttagatcctttattagtcgattctgttgattttgttagacaaggtgcacttttagcaaaatcaatgattttaatccaacaaaatgagaaaactttcccaaagattaaagaattcagagaaaaattagcatcaactataggaaataaacatgaagaatcattggctagatttggtgcaactttagctcaaggtatattagatgcaagtggtagaaatgcaactattcaacttagaaaacccacaaactagtacattaaatatgaaggcaattgttggtttgactatatttacacaatactggtactggcatccattggctaatttcttatgtctttcattcaccccaacttcagttattggtgtcactgaaaatttgaaagttccaaaaatgagtattaattgtcatacaaaggaagatatttttgattatcctccaaagactgaagttcaagttgaaaaacaagctgaaaaagttgcaactgccgttttatctactacacatagagcaagaaccagagctgcaaagaaagtaacatcatctgacaaagaagcatctgaaaagacaaaggaagctgaagataaaaaggaagaaaaccaggaaaacacagcagatagtgaagcacagttagatactgatcaatttaaatctctatacaccaaagaaccataccaagttgaaaatatgacaagaatagtaccagttcaaatgaactatattacattttccaaaagttccagatttgttccaatcagaaaattcaagtctattggtagtgtagttgttttaaaggatactgaaccaggtgaaccatttgaaacaattaagtcatacatgtctcaaaatgtaacgaatgcaccattacctcgtcctttcaagatcgatacaacaattgataatattgaggatatataattaccagttgtgtatcaaatgtatataatatgaagtattcaaattgtctatgattacaatatatttatagattagtcaaagtaaacgtatattaaaagtacataaaattagagcttaagaaactattatttaaatctgtcgaaagcattttcaagttcatctttcttacgttgtatattattttcaagatctttcttttgttgtcttaattctttttctctttctaatgccttttgaacacgcattgaacgttcagtaattaaattctttctatgctttctcttgaatttacgaagagctgaattctttgagctagtttcaggctttatgaatttttcaacatcatctcttgacttattttcttcatcctctaatgcagccgcattccttttcactttgttccttcgctgttagtctttcatgtggctttctacgatcaacagtaccaataacattcggatccaatgtaatcatatcatggtttcaatttattcattaacattctaacttcagtttctcttctcatcttcttagtttcatatggatttatttctaatgcatcaaagtttgactcaccggcacctggaacaattaatgaagaaaatccattattatgaccaacaccaagtatatcttcaaatggtacaaattttgttgtttgaacttgtgaacctggaattaaatgtgttaaatatggatgtttttggtgagatttgaaacaatctttccatatagtaacatgtggaccccaaccaacagatactaaaccagaatctgatatatgaacagaattcccctgtgttggagttgaataactatctaattcttcaaacttacgaatatcccatattttaagagttttatcagcacctaaagcagccatatatctaccatctctattgacagcaattgaacgtacaggaccacgacaaacttgcattttagccaaaggagtactcatacctggagaccataaagttacttgaccatttgaatgacctgcatgcataacagcattccaaggattttgtgccattgaaactgttggacctaatttagttcttagagcaccaaccatttcaccagttgaaatatcatgatatcttaaccaccctgatttaccagcagagaccaaaagataatgataaggtaaaaaatctaaaagtgttggatctaaatgttgtttcaatttatgaatttctgtaccttcatgatcatagatataaacatattttttttgtgcaactgcaaacatttgactattttgtaaatattttgcagcatttgcagtttcatttaaatgcaattcagtatgtaaagtacctaaacgccaatcaaatgatgcaacatgaccctttttaccacatattaataaatctcgacctgtacgactataatcaattgtataaggtccataatcatttaatttaagttcaaatcttttatttgcagttgatatatcaacatttttaacaatttcatcttggctaaatctccaagatttttccattccatcagtttcgatgaaaccttgctcttctgttaataaaatttcagctctttgagcttcctctaatgcttcttcatattcattatccattttctttagttgtctttgtctttttcttgcagtagcagaaggtttgttaccaccatttttaatggtattttgactatcaacgatttcactcatgagtgtttcactatgtacagtttattaattgatttgacgttataaatatggtgaaatcccagaaaactattaatctcttggtgaaataaaaaaatttcattaacaaaatcatttttagagagaaaaatataaaaaaaaatttaaatactgaaaatttccattttcgcttaacttgcctatataggcatttttcagaaaagggcatcttctattatgtttaatgatattaactattatcaatactgacaagttgtatcagatacggtgcatgtagtttcttctaagagcaagaatgtcagcttatattaacgaaagtaattctctagtacttgatagcagtagtttccaatcaggaataaattctccaattgtatcccctgtagttaatgatgacattgttttggatcttttgtcagtaaaggaggatactagatgctgagccttcaacacttcaacggagatcatcaattaggaacttattcaaacatttcccctggagtaaacaaaagaaaccatcttcttcaaagaaaaacaaatccaatgatagagctgaagataatctatctgcaataagtagtgaaagtaccgggggaaataataatgaagtttcagtaagaatcaattgattcttcaaatagaggtggtaaggggcaattcgataatctatatgatatatctgctccactaacacaaacagaaactaataaaattagtgtagatcaggaaaatattgttaaccatcatgattttattaataataatggagtgaaatctaaaacttcaaatacagacaaaactgaatcaactagttttgatattgattcatcaatgagaacactttctcgaacattttctgtattttcagtaagatctaggtcaaaacatcaaaagaaaactaaaaaccatgttacatttagtacagctcaagctgctcaaattttgaaaacctataagcctattcagaatgatgattttgatgactcagaaaataaaagtgaaaccttagtttttgataccattcctgaacacaataatgaaccattgaaaactgcaaattataatggtgatgttaaaaataagaaggaaacctgcaatgatgaaaaaatttatttatttcttaataataatgaagaaagtgttgaacagctgaaaaatatcgataaatttcttacattcccatattcaaaaactaatcatactaattcaaatagaaaatgggaagataaaacagagcaaaacaaatcaatcttattatctaagaatttcaatttagatagtgacaatgaagtatcaacagatggtgagaataataggggtgaaaaaggtaaattacgcattaaggatgcttcattgactgtagattcattgaatgtacctggagttttagcttatcataagaatgttgatacaaatcaaagtatggaaccagttgagggaaatatgaatttcaaaagtgttttaaaccagcaaatggatttattagatattgagagatttgaaagaatccaatgcccacaaacaaccccgaaacttgattttatttggaaaacatgggtgtgtcaaccatatgaactcaacaaatctaaaaagtataaagtaattcacaaaataactgattataatactttcacaaaaacggaaaagaaatatgaatatttgttcatgaatgaacttgttgaaagaaacgaaagaatttatattcttagagatgatgagaccccacctctgcaattaagaaataaattcaaatcatatggggaatatgttttcaatattccatatggggaagatcatattgctgtttggaacacagttacggatttattaatcagaggtgaatttgacaaaaacactgctcagtatactatcatgggtatttgttggaggaaatatttattgcacctagttgaagggtttcatttaacattttatattaaagacagaatcaatttcaaagaggagaatgctagattgttattaagtgatatccgactcgctataccagaaggacaaaaacaatattttaaaaaatgcagaacactgttccccgaaacaaacaaagttgtggaattaacttcattataacggcccattactacatgtaacaattgcttaagcgacaatagagaaataacaggattaagggaaggaaagcgtgaaaagtagagaagtttagatgccgcttagttatgcgataattagtcgagcatttaagttttgcaaatttattatggatctttactgttttcagtaattttgaaacttatattactcttttgggaaaaagataaacatcaattcttttactaattacttaaacttatctctaatctgcaacttttgcttagactaaaaacatgtattgcctgcataatttcttcgaactttgcttctgaaacttcaagctaatcgtttctacactagcatatacccatttttagtgacttaaactctttaaattcatataagatttagtttaaaattagatatcgtgtttccatattttaagactagtgaaaaattggtgttagaatatgacctattatgtatgatctatcaccttggactaaaataacattaactccatctctagtatcgactgtagttaatggcgctttatctatcacacttttgtcatcacaggattttcttaatgtcccattgctattatttacaatttttgaagggttatcagctttactaatcatttcacttttatcagggatatgttttccttctttatttgcaactaaacttataaagctaatttatattctcaactgttttttgaattttgcttcaacagtggttggaatttactggataaattcactcatattcagcagtcatacaggcgcttccgattcattacatatacgacaattgcatgtcagtttgactacaatattcatcatttcaataatattaaaatcattaacaatattttttccatatatttcaacggaaaatgaaaaacgccaggatttagaaataatgatgagtttcaaataattcaaatactagagttccatcagttttcacagattcaataaagaccggccaatgtccatcaacagctaattccaaatacagttcaagtattcatttcaactttagaaggtgaaaatgagaaagtcaacggtccaatcaaaaacactttaaacttaaaacttgcagaaatgtttaaaataaatgataaatcaattatctcacagtcaggcgaacttacaaatcaatcagaacttggagatactacaacaaactccaatattaatgtaaataaaaatataaatgaattacttcataatatatcaatgccaaatttaagatcaaatataggtcctttgatatcaaaaaatttactcaatactaaagagatgcatttacttgaggatttagatgatgtatctaaagaatttgctgaagagctcaagaacgagaatgaaaatacagcagattcgataattgatagtttagaagtttcaatttccaaaaggagaaaatgtttcaccagttttaaacgattatcatttccccaactttttaaatgatcatgaatacgacgaagacaaaagaattcaactattaaatatttcagaaccagtattcaccaataaaaacattgaaacaccactgaaaagtacagcttcaaaacatttccccagaggattggaaattaaataatgagatgttcttacagaactcaaccatgactcaaattgacataccactcattgataatgaccaagtccattaattcaaccatcaatgatcatcaaaacaataatattgagtatcaccactacgaaaaacaaaacaactttcttctagatgaactaaggaaggaaatacactgaaaatgatatgcaaaaattaaaacatcatgaatcaatatctaaaatgagcatgctcatcaaggggtagtttcagtaaaactacaaataaaaaggtattcacaagagtattgagaggttcaatctcgtcttcagccttgataccagtcccaagtaaaacacaggacctagcttagattcactgagattaactcacactaaatcaaattcagtttcgaacaatgtcaacgattaagactaaatctcacagtccattgaagaaatttatgaattataaagaacctatatcaccacttgatttgaactccaatatttcaaataatgatttagatagtgatgttaatttagctaattcaataaaattatcaccaaagaaaaaatcccttaggttgaaaacaccaaattacaggaataagaaattactatcattctcatcattacaggatattaaaaccaaaatgggtgatgataataataacaatgtgactaaatttacaaatttgtcaacaattaaaaatgatcaaagaaatccattattatcagatatattactacctatcaaatctcatacacaaagagtgtttagtggaactgataaatctacaatatctaatagttcagtcccaagtggatactatggtgaatatgataaagaaaaatggaaaattatcaaaaaaggtagcacaaaattacagtgaagataattcaccaattgataaatcacttgatgatgaagtttacacttaaacagcctattttttctattattctaataaaaacttttctatataatgtatacatgctataagattattaacgtacttacttatttaacttacttacataagtaatgattctttcatagaattcaattcattggttatctgtgcaattgaaatattgtcatcaacaattctaactttcattgctagatattttggatgtgataaaagataattcaatgcattaacgaatatcttcctttcttgtatatcgtctaacccaggaactaatttaacatcttcaacattaatacccaattcagtacttgcataggtataacaatctaacgcatttaataatttagccaacagaataatttgttcagtttcttcaattatttcagtacttattaaactatcagtttctaaccaaaattgtaaagtatctttaaattgatttttaaatattaatgcaaattgtgtaatgtaaaatataattttatcgccgaaatgtgatgcaatagttaaaattattggcattattcttttaatccaaagtttgtgtaatcttataattgttaaattatttgaatatggtgttacatgagtcttttgaataattaatgaaactggtgattccattaacaaatggaaaataccattattaactaatgtctcagaaatgtttttgttttgaatgaattcataaataaatgccattgagtaatcaataaatacttcttcgttatttagtttaatcaaatgagatgatgtgaacattaatgaaattgatctatatgcacctgaattaattaaaattttaccaatattattgtaaaattcattacttaatttaagtttaaaaaactcttgtgttaatgataaaactaataatatatcatcaacttgcttagataaaaatgatgcattattttcattgaaatttggaattgataatgcttgatttctaatattattaaataaaactgtaattggtttgcaaatattatcgctgaatatatctagcaataaatttgaatgttctgaaataatctttggtgattgaatcattggtaatgatataagtaaaattcttaataacggtttataatacccaacattgattgtggtcaaataattatagaagtttacttctcttgatgataataatttcaaacatgataataaaattgtagttatattatcatcatttggtttttcacctaatttggatatagtgaaaatgattaaaaatgataattccattctcatattatatatttgatcaccaaattccaccaatacaccttcatcatcattgatttctaataattttgatgctaattgagcataatataaattgattttggcggaattgatattacagaaacatgttattaacccaccataagcttttgctaatgatatttggaaatgaacaaatgtgatttgattatccaattcgattagatttgaagtgtaatttattgaaaacttcaacatttttttcatcaacaatccaattcaatagcttatcatcaaatacataattggtgtatgaaaataaatcatttttatcattttgatatttctccaaactgaaatctccaaaaattgtagctaattgagattcaacttccttgaataaaatagaatcatagttttgaactttaaattcagatttgagttgatcaatgaatttatctgaatttaatagttcaaagattttggattgacattttggacttttatcttgcgatacaactaaatattgggagacaatttcaacagattttgttattataccaactctccatttattcgtaccttctttactatcattgttgataattttaatcaatttttcaacaaatgttaaattgtcagcatcagagcaaacaccgagccacactttcaaacttaatgaaacggcttgtaacaggtgatatgtataacctgactgattatcaatagtttcagtaactgctaatttcattgcattatataatgaaacatcactgactgagatatctgtcttttcatttgaaattagtttaccagttatcaaaaataatgaagtacccttttgattactactcatgattgcagaaattaaattaaaagttgatattttcaattgataattagctttattatttgaaatattttcagtcaaacagttcaataaaataactgaatatgttgaacgtaaatgtgtaagcattgattgtggtttatcattccaatttccctttactaattcagttaataaagtgaatatttcagatttatagttacttgataaaatatatgcttttatgatatttggtagatctatgtaaagtttcttctctaatgaagaaggaattgagatatctgcaattctccttgttttaatcaattgtgagaaaaacttaattgttgaaattgtccacttttcataaaaatataccagttttagaatattgagaataagtagatgtagaatctgataataaattaagacattggaataatgggttaatggaaactggatcatctaaaacacctattaagaaatgcgcaacaattttatggaaacttgattgataaatatttgataattccttgaatataattgagttgaatttagtaccaaatttacaaattttattcaaaaatgtagttattagattaccaatttgaaacttttcatgttcattaatgtatttccaattgaaaaataattcaaaaatttgaatcaataaattagtgaaaaaatttataattttctcctttaaaacatttttatcagtatcaagttttaaaatcaatgagttattcaacaatgtattagctaattctaaaagactaatagtgaaagaatatgatccttgtaaagtttcaactctatcaattatatcgaatgctaaaccagagttatgttcgatatagaataagtttgatgaatacaggacagaccaaacaattgaagtataacctttcttaaccaacacattaaataaattaatacaatttgaagataattctgcatctttcaataataaagcttgattaaaagttttaacaaataaatcaatagtgtgatattcatcaatgaatgaatctaatgaattgaaaattaaatcaatgactggtttgtctaattctaggaaaatcttagttaaagtttgataaataacatttctagtttgatttctctctaattcatcagttggtactttatttgataattgttttattattctacccaataatgaccaaccattatattcatataagaataaaactaaggattgatttttattagttgataaaatttgagcgtttgaaccttttttcattaataatgcagcatcattttcatcattttcaaaaggtaatttaattatgaaatcatcagttaatgtgactaactcgggttgttgatcattaattttataaattttattgaatttagatgtttcgactgaaaccatataagtaggtattgatcttaattcttcaacagctaaatttgaattaattgaaattaattccaagaaagaatttaattgtaagggtaatttagcttttaataaaataagtaattcctcagttgaaggatttgaaaaaaatgtttcaacaattttatttgaagaatttttgatgattgtagaaattgttttgataattgaataagttggttcaatatatgggacaaatgcagtgacaaaaatacctaatatatttggataaattggatcataagatatcaaatcattacaattaattaaagattgacaaacatctaattttgccgcttcctcagcaaatgaaagagatacaatttctaaatttttcaagactgtatttgatattgaatcttgatattgtttggcccttggatcattctttaataaatctaatataattgattgtctatgcaaaataatcgaccaagcatataagataattgaattagcctttgttttcagtatatgatttgttatattagttaagataattggattgcttagaaaagatccatccttatcatcgatagttcctgtgttatgttctaaatctaagaataggagagttactaaagttgctaaactttgaattgttgataatatttcattagaacaattgaaattcaaagaagataaaaaatcagtttgttccattaatgatatccatttttcaactgaagatattttaaagcctgaatttgaatttaaaattatatgaatagaaaagttcaatatgtcaatcagcaatgatgaaaggttagcttttataacatcaataaacgagaaatcaaaattattcgatgaattcaaagagtttggtgattttaaagaattgtaaattttagagatatgaacaatgttttcaattaaattatcaataatattatgaccatttgaagttattaattcaacatattcattaaatataggttgattaaattcatttttaacaattttcaataatattttgaaatagagagattgttgattgaaaatcattgtaattaaataatttaaaacatttgaatttgatggtgaataagatgattctggattatttattgaaacatttttaacagtgaatgaaaaatgattgactaattgagtaacttttgcatgatctaaatttaatgtctgtgagatgaagtctatatgatttttataatcatttgaagtagattttgtgagatcattagatgaaattttgtcatccttaagataaggtaatttaccagtgatcaaattgtccttatgatttgttaaaatagttgataaatcatctaaagtagttaattttgatgaaatcaaattattattcaagttatcgaataacaaccaatctggtgaaattttcgcatcagaggatgttttgaacatatttgaagatactgggaatatgcagaagagagtgaacaatccagttactctgtgaattagttaattacagtaataaagggtagatatatacaaggaaatagaaatagagaactgatataaaacaagctgagcattcaaatttaattcatgtcaacacagggcaagttctgctttaagtaaaaaaaaattaaaaaaatagcgaaatctgtgcaccagtaattattttcatctattttcatttataataatagatctcttcaacttctaatggtttattcattatctttacctgtgaattgattctctaaagttaagtttattggttctttgttgtgtaatggtgtatcaattagtgtagtattgtatacagtagggtaatcattagtcgcattctcattttctgtttgagaaactaataatttccatctttcatgacattcttcaataacttcaattgctttatctttatttaaccattcaccattaaatgcaaattgattaattggtttattcattggtaatttataattttgaaaccaattttttaaattatttaataaattaggcatataaatatcaacatcatttatattatttaatttatcacttaatttatcattaatatcaatacttaataatttccaatctaattcaccatcatcaatcattgctaaacaacctaaaattttaactttcttaatatcaccaatttcatgttttgaaacattcgtactaccaatttcacaaatatctaatggatcattatcaccaaaatatttattatttaatgaaattcttggatcttcccaagtttgtgaaattgcaccataattacatggatatccatgaaatggataaatattattaataaatcttaatttacccttctttgtatcttgaacaatcggattatatggtaattttttagaaatttcaaatttaccttgttcatatcttggaatttcaacaatcatattaacagtaccttcatttttattaaaattaattggtaaatcatggaaaaatgattgaacttgtttattttctgaatttattaaatatttcttatattcaagagtatatttagcttctttattgatcgtacttaagtatcttttaaacattgttaaaaggaagaattggtgatactagctagaccttaggatcgatattggaaattgagatcatgtacgtaatcaaaaaaagaaaaaaaatagcaagtattactgaaagtggtagcaagattatatccttctttcatattattattattattattattgttttaaatagtgtattataaaatattagaagaaatagaaaagaatgttccaatgatagaactgaataaaaagccaaaaagaaagattaaaagaaaacgaagaagtaaaaaaacataaaaacataaatgacataacaatacgatcattgatcaattaaattccaaccatctttagatacaatataaggtaaagaggatcctaacataccttcaaaagtttcttccttttcttcagtttcagtattggtgttgttgttatccagacttatattatgatcaagatgagtatgattgtgattatgattatgattatgattgtgatgattatcattcattttgagaaagtaatttgaatttaacgaattatttttcggattgaatggtaaattatacattaaatgaaatttattaatacaatattcagtatttaatttctttgatcttatctttgataatttatttgagatgtacttccatttatgaatttcagctaatgaaagtaaattctttaaaactattacatcctcttcagtgaaatttgataaatcagttgatgggtctgcaggtttataataatctggtgataattcaggttgtctattaagtttgttattattgatattgttagttgtactacttagtcttttgttactactattactattatttctaaaaggttttgaaattttattggtattgttaataatggaattgttattattattgatattattaatatacgagtgattatttttaaaatgattttgtaattcaaattgaacattcatatcaggtttataacttgataaatgatttgatattatagatgtatcatttgagtttaaaagatttgagtgtgtttcatagagagtgtcttcatttgggaataaaatatcattcgataaattgttattatttgtattttcagtaatgttaatattagcaatattattattgttattattattattgtagttgctattattgctattattgtgaacgtatttattagtataaaatgagttactaaacaatcctgagggaatagcagatatattattattagtggtaagcattgttacagaaagtataatctataaagaaagagatacagatacagatacagatacagatacagataatagaagtatgtcatcatcatcatcatcatatattatatgaattcataaaatattaatatagttatcgtacgattaattaaattgaattttttttcaaacggggctcaactttttattttttactcttcttcgacttcttcttctctttcttctctttctttatcttctttaactgtttggcttctttctttaatctcttcttctctctcttctctctcttctctctcttctcttgctttcgacgtttacgtctcttcttatcatcttcatcatcactctcactttcactttcattatcactatcgaaaaaaatcagttgttctccactatcatctcctaaactaatatctcctgcttttctcttagtcccattagcattattatcatcctttactaatggtttaccatttttatcaattgtacccattaatactgatcctttaacaaacatttgatataatggactatttttctttctttcattattttcaatctcttttcgtattttttcatcattttcaaatcctttatctttattaacatctaatgattttaattgcccatcgaaaactgtttcccaccaacaaattgtatcatttgaatgatgtccaataccttttaaatcaaatttatgtgagactaaaattggtttctttaatcctcccttttgtaatggttctcccttcttccatccatatgattccaaatatttctgtgaatccatactgtccttactttaccaagaaacagtataatatacgggtaaaagaactatataacttgtaaaatatctccaagaaacaaaaaacgaaaagaaatagaaaaaaaaacttttcccacaataaattttattatgtgcttaggtaacacacaataaatttatccgctttaatagtaatacagtccacgatataatatatcaataaatcattagctgtgaataacttatcactgatcatcgaataaatactaagcaatatgggtaatacaacttctaatattaaaataacatcacacgataaagccatactacaactaaaacttcaaagggataaattaaataaatcaaaattgaaaattcaatcagttatagatagagaaataattattgcaaaacaatgcattgcagagaataaattagataaggcaaaactaacattaagaaaaaagaagagacaagaatctttattaaataatcttgaaagacaaagtgatacattagaggaattaattgacacaattgaatttaaattaattgaaaaagatataattttcggattagaacaaggtaataaagttttaaaagagattaataatgaattaaatattgaaagggtagagaaaataatggatgattcaatagaggcaattaattatcaaaatgaattaagtgataaattaggtaatttattaacaaatggtgaagaattagaagttgatgatgaattaaggaaattagaaattgaaatgggtgtaataaatgataataaagaaactgatattaaggatacaattattgacaagaataaactaaataaattaaataatttaccaaatgttcctaaaattataaaacaagatagtatagaggagggtgaagatgaaatagtggaaaataataatgaattatagtaaagtaccacaattagcattaactgtataatactgaataataatattctcttagctttttttctatttttataaaacttgtggttcatctaaccaatctaagaattctggtgtaaaatatgaaataattaatcttgcaccagctcttaaaaatccatgatgagcttcaaatgcaatactctttaaatcaacaatacccttttcagcagctgcatgtaacattgcaaattctccactaacatgataacaacaaattggataatcattacaaattgttgatgcatctctaacaatatctaaataaaatgttgaaggtttaacaattataccatcagtaccttcattcatatctctaattaatgctcttctagctaaacctgcaccacctgatggtaattgataacattttctatcaccagttgatggacatgatcctgctgcatctctaaatggtccatataatgaaccactaaattttgctgcatatgacattaaaaagattttatgagctaaacctgcatcaattaaacctcttttaattgccttaattctaccatcaatcatatctgatggtgcaattgaatctgcacctgcctttgcataattaactgcaactgctgcaattctacgaactgataattcagtattaattgatccatcatcatataatacaccacaatgtccatgatcagtatattcacaaagacaaacatcacacataatataaagagatgggaaattttcctttaatgctttaattgcttgaataactggtccttcaggatcatcagctgctgtaccttggaaatcttttttagattcatctaataaaactccaaataaaataactgatctaagaccttttttaactaatgaatcaatatatggaattaattttttaacaccaaatcttttaatatttggtaatgaaggaattgcagtttcatcatttggatcatctgatataaataatgggaaaataaacatatttttttgaagttgtctctcatgttgccatgctcttaataatggattattataaccaccttgtaaaactgatgaaatttcagtttcttgatgtggtaagtattcagcagtatgtggcatatcagaggttagttgaagaagatgataaagaagatgatacagaagatgaatgacccaacaataccttaacaatcaatcaaggagataagaaaatggaaaaattaaccaaatttagtcactgcgtctattaagtctatataaagctatttactatactatctacgttgaatatttcttctaatagttgatatcttaccacccattacttcattagataaactagcacttacatatggtaatgcatctaatccgaaactactccaataagaggcagaatcctttaatatctgcactgggtaaatttcttcaattggtgtatcctctctacctttaaggatgaataatttttcattgttattaagtaaattatctcttatattagtaaaatctattggagtgtacatgtttattgtattatttttagtgtctatagaatgtattaatgctaatccatggaatttaatatgaggtgataatgaatgaaatattgtttcatttatataatttggacaattttcatgttttaaaatatttgatgaaaatttagtagttaatgaagttgaaggtattgtaactattgcaacatattgacattctaatgattcgtgtaatccctctgtgtaagagaatggatgatcaaatatggtaaatcctaaaatacctgggtaatttattaatgatgaataatcctttgatgtagtgtatgagactttcaatggtgaattacttagtaatggtttaaaattataatttttattttcataattataatgcatatatgataataatttaaaatttctaataactgcaggtgaatataaattaaaatttgaagataatgaagagaatgataatgctttgaaaattttagtttcataatcccattcaattgattgtaaaatatctaaatctttattagtatgagataattgaataagataagtaattgataatttactttttaaatgtgaaattatttcagtaccaaaacctttaacccaaccaggagaattaattattgtaattgtattatttgatgatgaaaggatagtgtctattaaatgatcaagttgttttagatactttaatggttgatgatttggagatgaaaatccaatgaattttgttaaagtagatgtagttgtattattttcccatggtagtatagtacctataagtggagatgttatatgagtgagtgatatacaaccaggtagacataattcaggttgtccaggatcaatatctaataattgaatttttttatttgaaatggatagtaaagtattaattaaaagtttagaaaaagttgatttaccagtatttttattaccaatagtaagtattgattgatgatttatggacattgaagattcattaattattgattgaaatatatttaaccattgttgatgtagtaaagttgaagatttatttaattcaggttcaataataatagtaaaagtatatgatgatatgaagtattttgtaatgaatttgaaatttctgaattgtataagtatttaacgtgggaataaagattagatatttcatcaaaatgattatcaatgttttccaatttaattatggatgtatagttatttgtagatgagaaaatggagtcattctctattggaattgaactatttgattgaattgaaggtaatgaatttatacttgaagcattaattttaagtgatttcccctgtaccaaggtataaccatcaataagaacagaaccttgtataactgaatatgagatatctaccctttattaccaatatatcatcactctgcaatgctaatagtatataatcatggtgatactggacattgacaccttctctaagtgaaaaatttgagttattcaatggagtgatagcagtgttttcaaatgtgacattatcaacaacattacctccctcttcactatcactatcactgttattaagagcagcaaatgcactcaaacgtgtggtcattgctgtaaaagaagagagagaagaagagaagagaagatacctaccacaacaaaacccgtgtcatgcccaataaccaatcagagcactcataaaattttcacatagattccctcactctctgtctctctctcactaagtcaaaccactttattattactattactatgctacatctatcttatacagggtatatttggatactatactagtcttctattttagatcttctctttcatacatacaactaactcacatacaatgtctgaatataaattacaaactccaggtttcgatgctagatttcctcaacaaaatcaaactaaacactgtttccaatcttatttagattaccataaatgtgttgcaattaagggtgaagattttgctccatgtaaagttttctggcaaacttatcaatccctttgtcctggtgattgggttcaaaattgggatgaacaaagagaaaatggtactttcccaggtgatttatcaattgaaagatttaaataagttaatatagttaatatactaaattattattattataattatttactcttctctactctttcattcatattattattattatcatatatatctaacatacatacatacatacattcaaaaaatatactctaattaattaattaattctgttgtatactccatcctttattcattaattcctttatttgattgacactatttattggtgtactcttacttttatgaaatttcatgtaaatatacataacaggtatctttttaactttatcaacctttaaaacttcatttatcactttcctactataaattcctttccctgaggatatatcctttatattattatctttaatatctttattatctttcttactagtacactcttcaatcttataatcaacataattcaattgataataacttatattctaattcacctcatcttaactatctcattacctttatcattattaccttccttcactacttttagcaatactattattattaaacttattctcttccatctcattaccaatttgtttaactttttgctttaatatctcaacaatactaatcatcttttgaattgcttctccattaatacttatcataattatttccttattattatccacttctttatctaccttctgtaaatatttaataattgaatctaacttattacgtattttaacattcttattcatagtaatatacattatttgattaccttcactattatacactttattatctctcatatgaaggttaaatactttctttatatcaattgtctgtgaatatttaataaattgtctctctttctgtacttctttcccattcttatttctcttattactattattattaccacccctactatcctctatatctatctcaaccactctcttctctaccatactctctgtcaatacttatcaactatataccacaataggaaataatataaatttttcaatttcctaattaaattttcttaacagtgatgagagatccctctcaacatgaaaaaacattggactctctgaattcgtgttatttactttacacagttatctcttcattgatcaacaatacccgtaacattctatcacatcccattacaaaacaataatgtcattgatatcatcacctcagactctgaggatcaagacaaatcttaaatttaaagaaaatgttaaatcttaatatcgatatagatatcgatgataataataatgatttaaataaaattgaaaatgaattgatttggaaaatacttatcttagataataaatcaagatcaattatttcatcagttttaagagttaatgatttattagaattaggtattacaatgcattcattaattaatcaaagaagaagtcaacttaatgatgtacctgtaatttatttcgttgaaccaacaattgaaaatatttcaattataattaatgatttaaaaaatgataaatattcaaaattttatattaattttacttcatcattaaatagatctctattggaagaatttgctaaagaagttgcattaattggtaaatctgataaaattatacaaatttttgatcaatacttagattttatcgtaactgaaccaaatttattctcacttgaattatcaaatatttattatgattttaataatccaaaatcaactgaagaattaattaataataaaattgaattaatttcaaaaggtattttttccacaattttaacaatgggttcaattccaattattagagcaaataaaggtggtccagctgaatcaattgctcaaaatttagatgaaaaattaagagatcatttaactaatattaaaagatccaattatgataataatagtaataataacagtaattcaaacaataataccaatataaattcttcagttttaatcttattggatagaaatattaatttaacttcaatgttctcacattcttggatttatcaatgtatggtatctgatatatttaaattagagagaaatacaattataattgaaaaattaattaaagatactactaattcaggagaaaaaattgaaactaaaaaatttgatattgaaccaaaagattttttttggaataaaaatgcttcattaccattccctgatgcagttgaaaatgttgaaactgaattaaataattatacaaatgattcaaaacaaataacttctaaaactggttattcatcaattcaagaaattgatccaaataatcaatctgatacaaaacatattcaagaagcaattaaattattacctgaattaacttttagaaaaaatataattgatttacatatgtcagttttatctgatttaattaaagaattagaaatgaaaaatttagattcattctttgaaattgaacaaaatttaaatgattcgaaaactcaaaagcaattcctagatttacttaataaagattttaaagctgataattcattagatcaattaagaacttatatagtattatatttatcatgtgatttatctaaaagtttttgtgatgaatgtgaaaatatccttttgaaacataatattgatttatcatcattaaaatatattaaaaaagttaaagaatttacaaaattaactgagaaaacattatcaaataataatttaaataataataatttaaataataattcaaataagggtgcattattttcaaatttatcatcaaaattaattaatttaactgatggttcaaataaattaactgaaggttttggttcattaatttcaggtataaaaaatttattaccagaaaaatctcatttaccaattacaaatataactgaatcaattatgaatccaaatcaatcaaatatttcattacttaatttaactgatgattatatttattatgatccaaaaatttcaagaggttcacattcaagacaaccaaaacgtaataattataatgaaagtttggttttcattgttggtggtggtaattattcagaatattcaaatttacaagattggtgtaatgaatggaatttaaaggatggtcaaattaataataattcaattaatagtaattcaaattttaaaaatgtttgttatggttcaacaaatattttaacagcaaaagaatttattgaagaatgtcaaaaattagagagttagtttgataaattaaataatatattatatattttttatataaataagatcttataaataacctttattctcttctaaaatttttgtactacgttgagaatctaaaaataataattgacattcatcaatatcatttgatgaaacttcagttcttgaattaattgaagctaatatattacatggtgataataattgtaatgaatatcttaatgaagattttaatgcaattttagttaattcatttaatgcatcatcagataatataattgattcagtttttgaccttttactaataatatttttaatttcatcagaattatatgatgaagttttaataattaataatctatcaattaaatcaggtggaataccatgaggagatttaatatcttctgcacctctaacagttgttaaacctctatttgatgctaatataacaattggtgcaattgttgattctaatgctctatttaaaaatgtaaaacattcaatatctaacatattaacttcatcaataaataaaacaccgggaactaattctgcaactccttgatcaatatatttagaaaccattttattaacttcacttcttaatttttctgttatttctgttttacgaggttttaataattgtcccatcattgataaaatatcttgaccaccttgaggttttgcatttgctaaatctaaatcatgtaatgtaatatcttgaacaatttctttctttttatgaacttcaccctttggtaatggaacatattcttcagcttctaaatcaaattcagttgcataagcatcagatctaccaactcttttaactgaaccagtatttgcttcaatatatataacatcaccaattgatactttctccttttgaattgattcataaattgatggatctaattttaaatttttagtaccttttgaagttttcaatccaactataacatgtttaattgttttaccataaccacctaaaggattttcactctcttcaggtgttaattcaattatttcaccttcataaatttcctttgtttccttaattcttaaaccaattgcttttctaaaattttccattaatgcctcagtttttttaacttcaacactatataattcagatccaacaattggacaaaatggaacttttggacctaattcttgtgaaactgctaatgctaatgcagttttacctgtacctggaccacctgctaataaaattgccttaccactcatttttttagatttaattaaatcaacaactataccacaagcttctcttgcctctttttgaccaacaaaaccaccatcaatttgtttagcaaatccatattcatcaagtcctaaacctttaatatgagtatgcgctgaagttcttgtatctttagtaactgatgaagtgacatttgcagtatttgtttgtggaagttccaccacaggttgatttggatttgttacagctggggttgacattattctgtttgatcctttaatgaagatatgatattatgatcaagtaattaaattaaagagaaaatttgactacactgtattctttaatgtttagtaaaaaaaattgaattttcactgcgcagtaagtggtgtcttctctatttactgtagtatagagagttataataaataataagtatctacaatgtattgaataaataaatagaataaatagagtgtctaactagagtatgataattactcccctttgaattcataaggaccaggttttccttcaacatcaaatatcatatgactaccatcaactaatttaccatcatgtttacaccaaatttcaactttatcaccaggattaattggaccaacaccctttggagtaccagtaagtataacatcaccaggatataatgtcataatacttgacattttactaataaatttatgaattgggaaaatcattaaatttgttaaatctttttgtctatgttcattattaacttttaaatttaattcaacattataagggtcaataatttgattttttgaaataaatggagaaattggtaagaaagtatcaaaacctttaccaattgaccaaggtaaacctttcttctttgcagcatcttgaacatttctagcagtcatatcaattgctaatgcataaccatcaattgcatctaatgcttcctttggaccaaaagtttcaggatttaaattttgtaattttttaccaattatacaagctaattcaacttcatgatgaacaattacattctttggaactaaaattggtccttcattaggttttaaaattgatgatgaaggttttaaaaagaaaaatggttcaattggtttttgattacctaagttcttgaatatgagccatataattacgtccaatacataggaacttaccagcattctttaaataattgaaagacatatcagaatgtacactatcagttgtagaaagaatgtcctctggtgtagtagacattgaagttcgtcgtaatttaccactacaaatactaattgaaaagcgcggtgtatccactatacgttaatggacaatcactcttctttataagagagtatcagtggatgtatcagtggatgcatcggattggattggaatggaataagtgtggcgtatctacatgttatagtctatattctattctttatctaatcattaattaacttatctactatacaaattaaaataaaattctaatgtgaaagacgatgttcctcttgtctttcaatcgctttattagtggtatgtgcaacagctgctgcaacggccacttgaacattagtactagaattatttaataaatgtggtacttcctcaactttaatactttgtggttgatcatgtgcctctgaaatttgtgaaacataattagttgcatttaaaactgtatttaaattttgtagtccaccaacttgttcaactaaatatgaacaatctctatgtgcaaataaaatcgtacgtaatgttaatgcatgttctcttaacataccaacttgttcccttaatgatttatttctcatccttataattatctaattcttttttcattgttgaaaccatctcctttttacgttgtctacattttgatgctgcaactctgtttctttcaaggaaattttgtctcttctcctcctctgttaaattcttacgtctcttaggctttggagttggggcagatggtggttgtgcttgtgtttgtatttgtgcttgcgcttgtggtgaggatgttggtgatgatgctgatattgatgctgctcctgacgatgtggatgatgttggactattctccttatcacttttggatttcttagatttagcacctttattactaccatttatagatttgttacttcttttcttcctattaggttccattagttatcgtattcttatcagtatcttggaaaactttgattattaataggtttcatgattaatccaggtgtatttgctgtactattacttacaattgatgaatcaacactatctttatgattatgtatcattcttgatgaatcaagtatttgttgttgtgttatttttggtattgattcattagttatagtacttgtcatattattaggtatactattatcatttattattccttgattatcttcaattgttcttaatgttggtacaactaaatctgttaatcccgtatgtaaagttttctttaaatcaatattaggatctgtattatttgtactaacagtattaccattttcaatcttcatagttgatgaattggaattattattagaattattagaattatttaatgaattaagcatactagttaagggtgtaatagcacctggtgtcatcgataaatatgaataaagtggattattagttgtcatagtttgatcctggtgttaatcctgtacgcattgaactttcatttggtgttaatcctgatcttttggcattaattaagaaattatacatttgttgatctttaggatgtggtggtggaacacttattttcattttacttgtatcattaattgaaggtgattgttgagtttgagttggattttgtgtttgagtttgattttgattttgttgttgaacttgttgttgaacttgtgctaatacttgcgcttgcaattgtgcttgtaattgtgcttgttgtaattgcatttgagcttgttgaagttgtttttcagcatgttgttctgcttgattcctcatatcattattaggaaattgtgtttgttgctgctgctgttgatgttgttgttgttgttggtgctggtggtgatggtggtggtgttgctgttgttgtcttacttgttctccttgttgattttgatgtgcttgaatttgttgaatttgcttttgcaatgtatcgaaagttttattattttgctgttgttgttgttgtaactgttgttgagctgtattcagagtatttggtgataattgtcctaagtttggtaaattggtattactagtaggattactactattattatttattcctggagtttgagggaataaagcattccaaatacctggagttgcaataaatgaaccaccacctggagatattataccaggtaagggaggtaaaacacttgaagtacctcttttagaacctccaggtgtcagtacaggtggttgaataaatttattttgaacgtttccattagtaatactattagattgaatttgaagagaattgttattattgttgttgttgttgttgttgttgttgttattattattattactattattgttgttagagatttgattatcaattttaatctgaggtataccattcagttgatttggatcaacatttaatggatcatcaacatttaattgttgttgtaactgttgattattaatagttttatcttggattggaatattattttgattgtttgtagttgataaaactaataccggatcagatttatgtgtatgaggttgaatattattagtattattattatatttatgagataaattatcaataattgtttgttgattatagttatgtcttaaattattcaactgagtatcactttgaggtttggttaaaggtttttctgatgataaattcattaaatttttattatttaaagtattatggaaatttgtattatttgttgatgatggtattacatcatcagtacgtgcaaatgattgttcaaagggattaggttcaagatcaagtatttgagtactacctccatgagaattattattatctcttaaacctaaggctatatctggattagatctagagtttgaatttgttaatgatgacatttattaatataatataatataatataatgttaatctagactagattagtaagaaagtacaacaatacacaaatatagtataattgccaagcgacgatgatgaatgtaatgtgagttaaaagggtatataagtgatatctatgatttattatctatgatctttgatctatgatatgtgatctgtaatatctatctataatacctatctatcctgtacctataatagatataataccaagagctatatgtgatataaaaagatgaaaagataaaaggtacaaaaacattaaaaaacattaaaaaacacttacataactctgacgtttacccttactataaaattttaaattttctcctttcctttcctttcccagcttaaagaagcgccactgacatcatttcgctttctattactgtattcttcatttcatttcatttcattttcactgtgttgcctttggaggctctgttttgcctttctattgtttctttatcttcttttcttatcttcgtttctctgcacaatgtctgtggataatcctgtccatcaacagggttggtgtatcacttatggctctgctggtaaacgttccttccctttgatcctgaattacctgcctttgctaataaacctgctcaaaaattatcattagaggctcattcaattttattagatgtatgtggatcatcgtgggatgatatcttcatatacttgttgtgatgaatctcaattaaatgttttatcaaataatcttaatagaattgcaccccttatttcttcatgtccagcttgtagacatagttttaatcaattattttgtcattttacttgttctccaaatcaatctcaatttattaatgtaacatcaactgaaactttcccaaatggtaatattgcaattgatgaattagaattttatgttaatcctcaaaactctttgcaattttacaattcttgtaaaaatattaaaattggagcaactaatggtttagcaatggatttaattggtggtggagctacaaattatacatctttcttaaaatttttaggtgatgttaaacctcaattaggtggttctccctttcaaattaattttaaatataatatagatacagatatacaagatatacaagataataaaaattcttctttaaaattattagattgggatactaaagattgtaatgatattgatcctaattttgcttgtgcttgttcagattgtccactcgtttgtccagttttagatactttacctaaaagagatgctcattttgatagtaaagtctcacattttgttctcatatcttattttatcttattaatattatatttctccattctcaaaatttggaggattaataaatcaaagaaacgtggagtattcttgaatgatgaagatacagaaaatgataccaataacgaatgataatgagattataattgaagctacaaatactttaactagctcaataatatctttcaattcagcaaatatacaccctttaaacaccaaaaaagcttacattgttaatagatatcttgaacattttttttacaaattaggttatatttgttctacataccctaaaattatcctaataataacatccattataataattatattcacttcatttatgtcatttattcaatttgaaactaatcctattaatttatgggttagtccaacttctgatgttttcattcaaaagcaaatttttgatgaaagttttaatccattttatagaactcaacaacttattttatcaaattcaactggagattcaattttacaggattatgattttattaagtggtggtttccaaaaggaaaatgaaatgataaatttacagtctacattgtacattaatgatacccagtataatgttacatatgatgatatttgctttaaaccattagaggaaacttgtattttagaaagttttactcaatatttttatggtgatattaattacttacctgaatccaattggaaggaaaaaattcaatcatgtgctggttcacctgttgaatgtctaccaactttccaacaaccattaaaacctaacttaatttttggaagaacagaagatcaaaatgaagatattttacaatcttcatcaattgtcgtcactttcttgaataataacaataatgatataaatagtaaacaagttcaaatggcatcttcatgggaaaatatgtttgaatcatatttattaaataatttaacagttgaagcaaatgagagaggtatcaacctaaatttcatgactgaagtttcattagaaaaagaactaaataaatcaaccaatacagatattagaatagttgttctatcataccttattatgtttatttatgcttcttattcattatcaatgaatcaactaaataataatttatcatttgttaattcaacattcattaccccctttggtaaagtatctggcaataacctaattttgcaatttttttcaaaaactaaattctcattgggacttattggtattataatcgttttattttcagtttttgcatcaatgggattttggagtttaatgggattaaaatctactttaattattgttgaagttataccatttttaattttagcaattggtattgataatatttttcttatttcaaatgaattgaaaaatattgaaaaattattcattatgaataatttaaatcttaacattaagattgcaaagacaatgtctaatattggacctagtattttattaagttcattatcacaagtcttttgcttttcattaggtagttttgttacaatgcctgctgttaaaaatttctcattgtatataacagttgctgttattttcaatacaatattacagataacaacattcgtctcaatactaacattagaacaagagagaattctcagtggtaaacttgatttaataccatttgtgaaaattgaaccaaactcagtttctttaccaattaataacaatggttatcattcaggatctggtagtaatttaattcaaatgttgaatgaaagtgatgatagtaattctaaatctatgttaaatgattttttccaaaagaaatttgttccattcattttccgtaaagatattaaaagattaataatgattatatttttaagtgtttttggaatttcattatcattaatacctaaattagaattaggattagatcaaagaattgcattaccaaatgattcatatttaattaattatttcaatgatatgtatgattatttaaatgttggaccaccagtttattttattgttgaagattttaatgttaccgcaattgataatcaaaaacaattatgtagtaaatttactaaatgtgattcatattcaatggttaatataattaatggagaatatagtagagttaatgaaagttatattgcagaaccagttagtagttggattgatgatttccttttatggatgaatcctgaattaaatgaatgttgcagagtcaaagttagaaatgatgaagaattttgtgaaccatttgcaccaccaagaatgtgtaaagcatgtttagctgagaaagattgggactatcaaatgaatggatttccagaaggtgaagaatttatgaaatattttaatgaatggattgaatcaccatcatatccatgtgcattaggtggtaaagcaccatattcatcgtctatatatgaagatgaagattttaaatcaattaaaagaagtgcatttagaacgctacatacagctttaagatcacaggatgatttcattaaagcatattcaaattctaagagaatcgttaaagaaattaaggaatatcatcctaatttaaaagtttttgcatattcaccattctatattttctttgaccaatatgaaacaattggaagattaactattttattactttcaattggtatgatagttatcggtgtaatcacagctatattctttggctctataagaaactcaatgattttaatcatcaatttattattcattatgattaatattattggatggatggtattgaataacatctcattaaatggggtatcattagttaatttgatgatttgtttaggactaagtgtggagtttagtattcatttaattaaatattttaatgaattaaatggaatagctgaagagagggctaaggaaagtgttgcatatattggtactattacattaagtggtattacaatgaccaaattaattggagtttgtgttttaagctttactagaagtgagatattccgtgtatactatttcaagatgtggattggactcgttgtcattgcatctattcattcacttgtgttcactccagtgttgatgtctatcattggataatttattgtgtattatgtaatctactatgtatttaaacgttcccatttaggcaagtgaagcgatgcgttaatagccaatatctcactttaagaagttggagaaaatctttcatttgcatttattatggtgacggattgatgtgttatactaataatatctttgattcaaaagttccttttttgaggacgcatttggtgtgtattgtgcatgataaagaggtggtcaatacaatttatatagatggaagcgttaaattcaacacaaacgattccacatagtgccgtacccggtaaacatcatgatattcgtacattaccagagacggagagaaggcccaatggaacacaaggaaataattttggtgataatgatgatttaaataatgaaccttcagtttgggcatgtgcattagctggtggtttaggtggagttattggtgatacaacaatgcattcacttgatacagttaaaactagacaacagggagcttcacataatggtaaatatgataatacattacgtgcatatagaacaatttttaaagaggaaggtctacggcgtggattgtatggtggttatggtgccgctgctttaggttcaataccgtcatcagctgtttttttcctttcatatgaaactgttaaaagagaggcattagcttatggaattccagaaactatatcatatttaacagctggatttattggtgatttagtttcaagtgttttttatgtaccatctgaagttctgaaaacacgattgcagttgcaaggtcgttataataatccttattgtaattctggttataattacaaaggtcttatagatgccgcttcaacaattgtacgtactgaaggtattaatgctctgttttatggttatagagcaacactgactagagatttacccttctcagctttacaatttacattttatgaaaaatttcgacaattggcttcaagaaaggatgaaaccctttcactgctatctgaattattaactggtgcagcagctggtggtttagctggtatgattacaactcctttagatgttgttaaaactagaatgcaaacacaaaatgcaacttcatctattcaacttaatacacattcagtttttgctagtttgagaacaattcatgcttgtgatggtatcagaggtcttttctctggtattgcccctcgttttatttggactagtgtacagagttcagttatgttactgttataccaagttttcctaaaaacactatccaaaacagattaatttatacattttataaacatcctaaaatatatttaaaaagtttattatattcccagcttcactaacatctttcaaaaactttgtataattttgggagtgtagctatctcaataacatcaccacgtaaggcatcagtacctatgaacctacttttgacaactggcataacaatattctcaataacatttcttaatttaactttagcttcttcattactattgttatcatcttcattatcattatcatatatcatatctggtacatagaataaggcaagttgtcgcaaaattccacctaaacactcttgttcatcctcccaattcacttttgtaatcactctaaataagaataaactcaatttgttccaacttggtatgtatccttcaataagtaatggtaagctcgttaatttaggattaccttcatctgatgcatcaatcttaatgttaaaatattcctcccacatctctttcatatcaacaaatgccgtcttaactgctgtatctaaatcaggtaaagttttcagattctttttaaataaatttataacttcttcattcccatatatttcatccttaatcaacttctttatactaagaccttcatcattctcattggcaatttcaataactccaaagttactaaaatctgcaagaccgatttgatagaaaagttcgtaacataaacttccatagtcaactaagtataaattaacatcatattgaagacataacaatcgtttcttgtaatcagcaataccaacatatgtgtgttgagaaaacaatttagttatgctatcatctgaatgcgattctacctcttctcttaaagttttaattgacagcaacgtcattggtttttgttctttaagtttgttatttggagctttgataaattgatttaatgtagtttgactataatcactacgtaccatttcatgttcatatagttttttaatttgtgatattggtttgagttttggagtttcagtctttttctcataatcattgattttcattcttttgtttcttctactctcgatatcatcttcaattctctttgtgtttgttaatatttgttgcgtcataaatatcctagaagaatctagatttttcaaaatatcattaattttatcaactatcaattcaataatctcctcttcattcaaaaatctaacttccttttttgttggatgaacgttaacatcaacattttctggcttgattgttaatgacatataaatgaatggacggtgacctttaggtagatatgttccatatactgatgtaactgctcgtcttaatggatcacaaacgactaatctgttatttataaaaaaaatgggttgaattgtctttttattttcaaaactggtattacttatcagacctttacagctaaccagcccataattctccctggtttcatcatctatttcaatatccaaatcaatcaaattatttgcaatacttgatccataaactgacttaatcctatcttttctacttgcagcttgcctaacattcacatcatatccaccaccaccttgtctttgacaattgaatccaacattttcaatatgaatactatatttactaacaacttcaactattttggaatattcttcattatgacttcttaaagcacgtaacctcgatggaacattataaaataaatcttcaacaactaatatagtaccatttttacctgccactggtttaataccatctgtttctcctccaataatttcacctcctttatatgatgctttccaagcacatgaatcttcattagtttttgttatcacacttacacgtgcaatatgtgaaatactggctaatgcttcaccacgaaatccgtaagttgcaattgactttaaatcatcaaattgaacaagtttagaagtagtaaatctttcacataaaattggcatatcttccttattgatacctttaccattatcagttatttgtaataatttaacaccaccatctttaaccattacttcaatttgtgtagattgagcatcaattgaattttcaagtaattcttttaaagcatttgaaggagcaattataatttctccagctgctataagattaacaactgatttatctaatggtaagatcttacgacgttctgatgacattgcctacggaaaagaacgagattgatttggtcccttaaagataaaagttgccgttaaaatttcagttaacttttggcgtcagtttttttgcttatgtccgacaaaagtttttcttgttaagattgattagttttttcatatctatacaatgactagtttaatcaacaaggatgatacgctgttcttgtattatactaaacttttgaaaggtgaccagattgatgaaagtgttttgcaacttcgtgatgaattcaaatttgagtggttattgagaaacttagatttaccttctcaacttaaagtccgaaatatcaagaatgaattagataggtatgttaagctgatcaatatgttaatacttagttacgttgtcagtaattttgagaataagatgagcaaattggaaatgacaagaaataaatatgggaaaccaaagatgttgaataaaaagtatcaattcaatatatcagatgaaaatggactggtgtcaatagctattgggtttaatgaaaatatggaagctgaagatattggtatagatttagctaatcctaaagatattgaaaggtttgaattgagcgatcttgctcatttttacagaaaggatttcagaggaattttcagtgataaagaagttgaatggttagatcaagaatttgaaagactagattatgacaaaagacttcaattattatctcaatgttgggcattaaaggaaagttactgtaaatatttaggtgttggaattactgctggaatggagaatttcccatttacggatttcagtgttttgaaaaatgcccatggtgattgttttgaattatcgccgattgttggttacaaacctttaaacatttgtttgaaaatacctgaaagtgaaatcattctttcagttttttcacattattcaaaagttaaattggaaaaaattgatgtaaagatgataattgattactttctaaataaagtataaagcaaaaaatttggagatatgattatgtttaattaatcttgaatactttttcacaaaaatgttcaaccacgattttaccttcttcaaagtttttatcattgtgtctatatattgctgcagcatgtgttgcatttgttttagtgatgtatattggatatttattccaattcaagtcattcagatttttaacaatggttctttgagctggtgacatgttcattttaaatgatttcaaaatttgataatattgaaaagcttcttctcttgtttggcctaatactttataatctttttgccaattttcaatatcatcaataggtattgaacagattttattgattgatgtttccaaaatattttcaccttgtaaaggttgattaaaaatagatttatttaaatctttaggagcagtaactgcatcgaagactgaatctaaaaagacatcaccctgatcatgaacttcattctctaattttgttaattcttcaacataagtgttacttaaacatggctctaacactggtgttgttggattagaacatagtggaggaattgtatttgaaacagtagttgtcacttgatcaattatctgatagatataaaaattatcctttaattttgctgattccttagtgactctgatgaaagatgtactaacttgtaacatgctcattaataagaaccaacatacccacattggaatatagatgaaagtattgaaaataagtaccaaccatttaaattttctttggaaaaatatcttaacttcattctcttcgatatcattgtttacattcaatgttgaagagtttgaacttgatttaatattataatcgattaaacctgtgaatttgattggtttattcacatctaataatacaggaccataattttcaacaaaagataattcgaactttgaatcattagggaaattgataaaaccttcatcgtcaattttaactgattgatttttgtctaaaatttcaaaaggattgatatatgagataccggaagtccaccaggaagttctaatatctgagcggatattagagtaaagagatttatatttaaattgttgtaaacctttatagaatattgaattcttattagccatcaattctaatagtgaaatatttgtattatcgaatttaattgaatcttttaagaatatttgcttaccactgttacctaataaataaggcacaaatttattaaaacttttaatacttaaagttgtaccaggagttaaaacgcctacatgaggagaacaaaatgttacaaaattaacaggtgtaatggaatcaaaatattttttatatgataaaataccaattgcaaatctagtgattaaaccacctaaagaataaccaataattgaaatttctgtaactttaagattttcatattgttgtaaacgagccgtttcatagataatttcatctgcaactcttgaaccacagagatcaataccatcgtaggttttaaatttttcatttgattttgttttaaatgttttaaaatgtttatcggggtgatttaaagttaaatgattcagtaaggtttcatctatataatcaaagtgttcggaagtacctactaatccgtgtgttaaaattatcaaatgacaattagaaggtgtattattattgttcatatgatggtgtggttgttaatagccaaagaggatgttagacattaaaaacttaaagaaaagaaagtaatagttaataatacaattataaacaatatgaaattaccaatgaactttatttataataacacttccttatcggaggggttgaataaaggaggctcatttttttatttaattctttattgttttcctattttcttttactttcttttatcttcttcttttcctcttcttttcctcttcttttcctcttcttttatcttcttcttttatcttcttcttttgttctaaattgatacattatattctattgtataaacagtgtactctgttatgtacactaagataaatgattttttatcagagaagtttttaacgatagtattcccttatcatctcatcacaagacattgatgatgtaatcgattgaacaatacataataaaattttattgtttcgattccagattaaaggtttttttttcttttctatcaaaccttttctacttccgattcctccggaagcgtggtcttatgactttaaattatattaacagtttatgctaaaaactatacatgtgtgttccattataattagacttaagtttcttctgatttataaacatcgatcttataattgaatagaacattttagtacaatgctcccaattaaaagattaacaaccattggtcttcacaatggtcatttattcaataatcgattacttaaacctaattccttaagactagctcaactgagatcattctctagatcaacaattcaaagatcagccatcaaacaaccagtctcattatttaaaaaatcactgaattatttcttcatcacatgtggtgtcgttagtggttcattcttattagtattgagtggattttttatttatgattatacaacttattctgccccattggtacctaaaaatttgttaattccatttgattcactgaatcctccaattggtggtcctgaaaaattaccaatcttaactaagaatttagattgtaatgataatgaaatgaaaattaaagatagttctaaaaaaaaattggttattttaggttgtggttggggttcagtatctctattaaatcaattaaatcctgatgattatgatgttacagtcatttctccaactaattatttccttttcactccaatgttaccttccgctgcggtgggtactttggatattaaaactttaatggaaagtactagatctttaatcaataaagttaatggtcatttccttcttgcaaaggccgaaaaaattgaatatagtgataaactcatcaaaattaaatctgtagatagtgatgactacttttatgttccttatgataagttagttgttgcagttggttcaacgactaacactcacggtgttaaaggtttagaacatacgtatcaactgaaaactgctgaagatgcattaagaattaggagaaagattcttcataattttgaaaaagcatgtttgccaacaacttccgatgatgaacgaaagaaattattatcctttgttgtttgtggtggtggaccaacaggtgttgagatagcagctgaaatatttgatttagttaatgaagatttaccacgtttatatccaatgattttacgtaaagaagtatcacttcatataattcaatcaagatcaaatattttaaatacctatgataataaaatttcggaatatgcaatgaatagatttaaaaaagatgatattgatttattagttaattcaagggttcaagaaattttaccagataaagttttatatactcaaaagggtatcgatggatctcaagaattaaaagaagtaacatatggtttatgtctttggtccacgggtattggtttaaatgcattaaccaagcaattatctgatgatcttaaacctttccaaagaaataaaagagcattagaaactgatacacatttaagggttataggtgctccactgggtgaaatttatgcaattggtgattgttcaactgttagaacagatattggtgaacatttacaagattatgtcaggcaatatattattaatggtgataaaaaaggctggaaacttgaaagttttctgggttatgataaaaaggatgatgacgcaaaaattataacagataatgatatcaaaaactttgagattacgaatactgaactaaaattcctatgtgatgaaattgctaaatataatccacttgcaagagaagctttgttattaactgaggaattaatacctaaatatgatcaatcgggtaaaggtagtttaaaatttaaagaactaaaggccttatttaaggaagttgatactaaagttacagcattaccggcaactgctcagagagctaatcaagaaggtaaatatttaggtaaaaaactatcaaaaattgccaatatgacagattctctgattgtgaatcaaatttataatggagatcttgatgatgcagttaatgaaccctttaaatataaatatttaggttcattagcatatttaggtagttcagctgttttcgatctaccgggacattcattatttggaggtttaattgcaatgtatctttggagatctatctattttgcacaaagtgttagtattagaacgagagttctaatgttctttgattggttaaagagaggtatctttggtagagatatcattactgtttaataactgtataatggcttaatatttacgtaatacaaatttgaaaaaaggcaacttttgatttcccaattaggaaaaaaagctgagcgttaacatgaatttgaatttagttattagtgtttaagtagtaaacttcagtgattgatccctttttgccttgccacaggagcaattctttaaattgaattctttttattttgttttgcttcttttttgcttactttgtttcttctcttttcatttactcctgtttgttttatttacttcttcctttggtagcactttctacagataattagctaagtacttgtaatacctatttcagtatttctttaactcttctttaattcattttggttttacttttttttaacaaaatggataataaggaagaaaaattaaacgtcaaagtgactgaaacctctgctgctgttgatgaaaatttctcagactctacaggctttaaaaattcaaaagcaactcatgatggtggctcaaaacttgaagtaaacaatcctacaatccaaaacaaaaactcttttagtactgatgatttaactgatgctaattctgttaatactaaagatccttcctcaattaatcttagtaaaagtaattcggatatagatttatctgattctggctcaccagagagaagagcaagaagaagaaaagcattttccaccattagaacttatcttgaaaaaaacaggtcaaaggtcacagaaaaagacaaaagcattgaagacactattaaagatgaaaacactgtcaaaaacaaaaatgatgataacgctaatgccaatagaaatgatactgttaatattaacttagaaattaacaaagcattccaaaacgatgatgagctttctttttcaaaagaaagaaaaattgaaatcaaagaacctgaatcatcacaatcttttgtcacttctaaagattcagaatctgaatttggaactgatattattacccttggtggaaaagctttaaataatgcagataacacaccaccaacagaaactccaattgatgattctcaatataattcaaacaagaaatcagttgtttttcaagctagccctgctgcaataaataatcaaacaaaaatggtatcattatacgttggtgacttggatgaatcagttactgaaaatgatttatacatctatttctcaaaatttgatggtttaatttctgttaagattccaatggatacaaatcataataaatcattaagatatggttatgttaacttcaacactcaacaaaatgctgacatagcaacggacggcttatcatatacaaaattgaaaggatctgaaattagaattatgccttctgttagagacaagcaacaaagagaaactttgggtactaacttatttttttctaacttggaccatgctttaagctctagaattatgtatgatcgtttcaaatcattcagcaaaatcttaagttgtaaatatagtgctgaaaagggaacttgctttattaatttttctgaaaaattgggtgctttaaaaatttgtagccaattcaatcaaacagaaatggatggtaaagtaattaatgtttcaattcatattccaaagaaagaaagagatttatatcaaaccaacaacaaattttccaaattacttgacatgatctctaaaaagcaaggaactgttgtctctccagttgaacctgctgaaaaaaatgttttattctctattgataaaacaaaagcagaacgaagtcaagctcctagtactcaatactctgttttcattaagaatttaccaattaatattaaagaggaaattgttaaaaatttagttgaaccttttggtacagttaaagatgttttgaagagagatgttccagataaaaatggtgcatgggcattggtgacaatgacaactcaaaatgcagttgataaaactattcaaaacttgaattctattgaagttgaagataaaagattatttgttacaagagctattccaagagaagaaaaagattacgctaaaagggatgaaaagtatcctaaaaaaagatacaaattattaattagtgaaattgatttggaaaaagaaaaggaaagacttgaagaatggtgttcaaattgtgactcaatcaaaactgctgaatttttttcaactgctcctaagggtgaaatttccaaaagtaacaaatacaatggatatggatatattgagcttaatgatgataatcaagctgatgatttggttagaagatttaagaatttaggaatttcatgttacaagatcaaaattgaaatttcatctaaggaaaagaatatggatactaaaagatacccatactattttaataattcaagtagtactagaaatagattacctcataaaatagcaactttttcatatgttgatcccgtaaagatgtatgaaattgccacttttcaaaatgctgttaattctgataagcttgcatatttccaaagtttagaaaactttaataaggtcaagttaagggaaaaaagtgcattggatgatactaatcaaaacttacttgaagaaagaaagagtgaaatgtatcatgtaatgtgggatttatgcattagattattttttccgaaacctgaactttatattcgtcccgctaatgagttgttaagtataccacaaatatcctcattaacagatctgatcattaaattttgttggaataataattttaatgaattttataattttgttaaaaagaatcaatttgatgatgataacaatattattcatgttgctaatccgatacttgaatatcaaatcactcaaactgctaaatatcttaaaataatataatagaaagatgttctcttcatgtgtaaaagttcaattatttaatatcctaatttgcttttttttgtttattttataaggctatatagaataaaaatattttaaaaggaaaaataaacaaatattaaatgttcattttatcatggcattgaataaccatgaatttgaaggatatagtattacaaagagaataataaaagaataagaataaggatgaaaaagattgtgacaacataaacgtaaaataaacaaagaataatagacaaaaatctaaatttatttgtgaaaaaagagaagagagttctgttaagaatttaagataggactattaaactaattctacataattggcagggaagataccttctatattacctattcttcctgtccaccaatcatcagttgaatctgatttttgaataatagttataatatcacctttcttaaatggtaaatcaccatcttcttgtcctgcaaaactatagagagcaattgctttatttctagaagctgatgaattacctgatctactattaaaatctggtttatcttctgttggtctataagctgatttacttgaatatgaatcaactcttcgaggtccgcctctttgagagcttcctctttgacttctatcaaaaacatcatcttcccaagttgaagcggaattgactcttcttgaatctccgttttgtcttctttctctactataatatgcacgagctgaatcttcactataatcatcatcatcatcgaaatcatcattataagacctattgttattatttctccttggttgttgattataagttcctcttcttggagatgacatcattgaatctgtatctgaactaaaagttgaaggaatatcatcataataatcatcatcatcatcataatcatcaggtgatgtacgactgaaagctcttgaatctaaaactctcattaatggttcacaggcaggtggtggagccactctaccacttaaaatatatcttgccttacactgatcaccataaaatttacgatttgcttctcttctttcaacaattgctgaaccttcaagtgatacaccagcaaataaaccttttgttttagaataagagaaaattgatgcaacatttttagctgatgcattacctgcaacttcagcatttctacctaatggaccagcagcgactgatatattaccacctaaagtaactgaaccatattgagcaaatgattcaactgctgcttcagtatttaagataaagacaaaatctgttaattcagcacctacttgaccaccaacacctgcacctgcagttacaattgcagaaggtgcagaccatgaaccatctggtaatcttgcaacaacaactcctgaacctgctctaccagaaaacaagaaacctgcctttaaaacagttataattgctaaaccttttgcatttagtagcacttcatgaggaataatttcatctgcacctaaaacttgattaggtttgataaatgaggctaaaactttagctgctttaattgattcatgttttaatgaccttggaattggattgttaatacccatattattatattttctaaacttgaatacttttttttatgtttctaactaaagttaagtgtaatgtatgtatgtatatatatatgtatataataatacctgaatgtaagaattgattaatgaaatactccaaaaggataacaattgcaaacgtagtatgcacccttaaacaatcaatacaacacctccagtcggaaataagattattgcataatcggagaagcaattagaagaggcttcactcacccactcaaaaattcgaatatattaggtaacatgagactggaaatttaaaatattatggcagcagtgcaccaggattttcactagagttagttacatgaatatagagattgttggttgatctgattgatctgattgatctgatggagaggtggttcttttggtaatggaggcattgcatcaaagtatagtaagaggtgtagatgaattacatgtttcaaaggagggacaattcaatgatgatgatttgatggatctttatttgactcttgtacgatattctcaagatattcaatatatgcgtaaacagatatatgaaagtaaaagagttgatccattggatgttaaactacatcaaactgagagaaagattcgaattttattacttaatgtcgaaattggaatggaaaaacttcataatgataaacttcgtttagattcaatcagggaaagagagattaaaagtgctggtattggaattgatcacgataatcatggtatagaagatatcggtaatggtaaatcaaaattcaatgattttgcagctggtgaatctattgatacattgaaatctagattgttaagtactaaacatgaccagcttgatcaagtacaaagtacagaagttcaaaacaattatcatgattcaattcaacaggaattaatagattcattaccttcaatggttacttctttgaaggaacaagcaatacaatttcaagaaatgttgaagcaagatgctgttattttgaaggaagctacacaatcttttgaaacttcacatggtaaatttgataatgttaatgaattattatctaaatatcataaagaaggtagattaggattttggttttacattcgtattacaggtcttgttttagcatcatttctatttcttataattatcataagactaattcctgctagacattgaaataagacagcatgaattatcttatagatgatatatatgctcactctataaaattgttggtgttattaataacggttcaagagatttacccttttcataggaattatcaataaccaattgatcaattattagccaatcatttaaactccattgatcacctttcaatatttctggtacattattttggaatgctggtatgatttgattatataaatctaccatgaaatcatcatcactaactgcagcaccaacattgtctaaaccttttctaaacttaaataattctaaaaaccatttaatatcaaaattttcaaattccgcttctacattttcttcattatagtagttaacatttttaagtaaccataatctcaaaatcaattccatttccatcttattcaattcacttacatctttattccattgtaaaatttctaagaattcactgaactcgtcatctttcttaaaaatatctttaatagtgatgaaacattttctatattcttttaataattgtttttccctattctttatttcatttttggttaaattgtaaatctttaattgtcctttacggaaagttttagcattattatagtcattttcatcaattaagtctttatcaaatgatggaaccttatccagtttatttgaatacttgatttctaaactttgcttgagcttgtttaaaccattcattgtatttttaagtgacattcctttgtcatcttcatttttacttatatagcaaaatacttcaagtaatccatcaggtataggatggaacttatttattaagaaaataactttattgttctcacctgcgttttgagcaactatcttttccgtttcttcatcatcatttatactaaatgtataatcacttattgtaggtaaatgaatattccataaatttgataatccgttctttatttcatcattaacagaaagtgataattgcaaagaatcatattcattttcttcaagtgtaaaaccataacccataagtaattctgcattacccttaggaccataattattgaatatttcaatctttgaatcatcaatatcatcactgttagataattgatcaatacatgagattttaaagttatttttatcagaacttaaccattcaactttagaatttggtttatgatttaataaatcaataattggtaataacataagttcatggggttttgatgttggattaatgattctatatgggaatgcacgagatgttgttattaaatgtgcccataaataatcattgaattttatgtaagaaattaattttgatcctttattaaattcaacttttaatagatggattttctctttaatataagattcttctaatgtagtattttcgtaaacatagagggacttttcaggtaatgataaaggactatgaatttgttcaatgctgggaagtaaatcaatataactttgaaatttcgagttttcaataatgccagttttaagagcagctatataaaacttaaatgctatagttgattcaagatcattttcattgattttgagatcattgtatgcatcttggggtttaattataaatgaattgggtatgtcaattgttaatggtttttctttggataatgtatcattatcatttgaaagaataaaagctgatattcctgaattttcagtatattcaaacttaattcttgaatctataattgcaccttcatcggttgcagatttaattagctgttctaatgacatataagttggatatataaaggaattttgttaatgaaaagctgaatcagtagtgatgaaaaatcatgaaaatattttcatcgatgaaatttgattcatgcagggtcttggatctttcttctttgtgatagggggatgccatggcatgttgttaataaatatacataagatgtttcgttaaataatcattacaatagtggtagaggaagatatataaatatagaaagaaaattttagaaagaggggatagtagtaattaatagacaatagataataaataaaagatagagatagagacaataataaagatattaatagtggaacatggtatttttttgatatatttttcttattttacatttttttttggagttttcattatagggtctattggaaattcaagataagataagataagatcagtttaacgaagatgaagaacatcaggtgcaaagaatataattatttttaaaagaatggaatatttatatcggttattatttatgctttctcttgtttctgagtttctgttttgacttcttactctttgctaaaagtttatcttcccattgatcatcagctgaaatatcattatcatcaaaattatcaatattttgtatttcattattttgattattttgaaaagtttcaaccatttctaaatcagtaactgatttacctaagtcttgatcttgatcaacaacgattaattcaggaatatcagcatcatctgatgaagtttttgattttttgaaagttttagttgatattggatttttcttaataactgaattcaaagccgcaacttcggcataagatagttgtcttaattgaatatcaataaaatcatcatcgtcatcaccttcaacatcttggttaatatcctttaatttatcatccttaccagcactagttccattaataggagtttgaccattgaggttattaatttcagaggatgcaattttcttcattgatatgactttatctacgacatcagttaaagttggagttgaggtagtatcgattttatcagattgttgtttcttttttccattgaagagataggaccaaaaagaacgtgaattcttctcttcaggacgtgtagcagcagtagcatcgttattttgattcttttgattatttaaagttccgaaatcgattactttcggagtattagaaataacgtcgttttgagggacattttgaatagaggattgtttattgtaaagcagggagagcattattccaagaggaagagaataaataagttaataaatcatataataaaatagaggaagggcaaacgtaaacaaaaggccatcaccaaatactcgtaacacgataagcagtagcgataagagaaaatagattttgatttttattgtttataatataggggagagttcggtggcaaagggaccggagttggcttttgatcatttttattttgttttcgtatttaaatttatatttctatctctatatttatttctattgcaatgctttccggtaatgtcttgaagctggtacgagaaaaggaattggaaagggaaagagagagggaaagggagagagttggaatgaatgctgatttgtttgatcaaaaatctttagataataatgaatttaataaaggagtcttaccatctcatgagtcggtttataatgtattacagcatcctgatttgaatagaggtattgatttagctacagttcaatcccgagtttcaaataataattccttgcataattatttaccactaaatattaataatttagaatttattaatactaatactaataccaatagcaataataatattaatggtactgagggtaataatgatgatgatgatatggacaacaatcttaacttttcagttacttcatggcaaaatgtcgcatctaattttgaagaatcaagatctaattctcaattgccaataactaggtatcaactttttggaaataacgatagcaatataatatcctccggtaatgaaagtcctgtaacgagacatgattttgataattatttgaatacaccaattagatttgatagtcctgtctttgaatcatctattctatctagctcatccggtaacgatgtagatcaacgagatcaagatttttcagaatatttaaatatcactcatagtaatgttgattcagtgaataatataacaattcaagaaaattcacatattttcaaacgttccctaacaatcggacgtagcgatactttaggttctgattcaagcttagattctgataaagatctaaatcgtacaatagattcaacaactataacttcatcatttgtaatgccaagagtctcaattttcaattcaagatctttaattgctaaagataatggatctattaatgtaagaatagttggtgataagaacaatatcttgctgaatagatttgcttcttataaaaagttatttcacaatattaatttctttgttaataattcagattctactgatataataattttgattgttaataaagataattatatgctaccaaaagtatccaaatctcattgcattccgattattttatctcattctgcttcaaaattggttaagaaaatacctaaaaatttaaaactttgtgacccaatttatcttaacaccctaaatgatgatttgctacctttaatcgattttttgaataatatagaaaatgataaatgttggaaattatttttatcttcaatcaaagcatcatctgataagcatattcattcgattacagatatcaattgtagtatgattcaatttaagtcaaacgaaaccctaaaacatgttaattcatactcatctgaaatctttgagagcaaaaatcaaaatgtttcaagaattgaaaatgatttatcaactgatgatgatgatgatgatgatgatgatgaaacaactataaatgaaaattatgaaaaggaaacacgatgtggtttacttagatatattgtaaataatatgtttgcagttggtatgacaataggaatcttatccattggaattattatattatgcgaaaaatgtataataccaactgatattattgataacacaatgatttatgataaccaaactgctatatccgaaaataattttaacaatgtattggactttgaacctaaacttaaaaaatccattactgacttcatacttgaaaaaataactagcattactattcttgttgaagaaaagaaagaatttatactttctcaagcttctttcttggttcaaaagacaaaatacttcatttttcaaatattgaatttttaaactaagctgaaaaaatactttattataccaatttactaacttataatcattaatttaagtcaaattatattatttctttttctaccattattctttgggaagggctacaaattgttactttataaactaattccacaaattactgaggcaaaagaatgaatttttgttttgaataatatttttattgtctctcaatattatatattttcatttttataagaattaaacatacaaaatgttattaaaaaaaaacagtaattgaaagaaaaaaataaaataaaaaaataaatttcaattgatcgaacccaggatcgaactggggacgttatgcgtgttaagcatatgccataaccaactagaccatccgaccaattatatttgctaaaaaacgctatgttgcttgtactattgatttgtgaagtttcaaaatttttaaaattaaaaaaaattgtttaaagtgatccaaaattgttgcaaatcacctaaacaatgtggaaaaatattctcataaataaatttttttaataaaataataattgttgtgtttcttttgcaaaaaaaactttttttaacaaattaggtttttcgagaaatgagagagactaaaaacgttttcaaactttaaaaaaatttcacatgagaaatttataaaaatagaattaaacacaatttttattaaatttttaattgtaacgaatgaatttatgaatctaaacagaaattaaatatttaagaagtaaaaaaaaatcaaaataatgtacaaaaaacctatttaaggatttattcaagttctaaataaagtgaaatacatttcatatttgataattgataatttcttaatgaataaccatcaataatttcttcaattttagttgttagtacctctgaccatttctcaattccttgactaccagaattatttgtatttgagttattacatgaattaaccatttcccaaatattattatttaattgcatgaatttctctcttgcattttcctttgatgctgaatcaaaatatttgatttctaaaacttccttacaaatagtttcagttacaagtaattgaattttccttcgaacataatacacatcactaacacttgataatctagaaacaattgataaatttatatcactttttcgtctatctgttggattataatctttatcagtttcactttcaataattggtttatctaaatatgtctcaacactgttatttgatttctctatattgaaattcaaagtaacattattttctatacttgagttatttgataataattttatatttgattgtgaatcgaattcaattttcaatttatctgcagttagtttagtatgtgaatttgcaatatttattttacttttactacttaatgattcatcttcattatttatatgaagattaaacaatattgatttttcaaatcccgatgataaattgtttagtttgataagatatgaattatcatcagacttcatctttgaagatgttttgatctcacctaatggagattcaaaacttaataacttaacattttcaggaaatttaacacatgtttcaaaatttctgattgtgactttatgtaatgcatttatttttttattgagcacttctgataaattttcaaaatctaatgcaacgttcagtttgattttattattataatcactattattatactcacttgaattcattgagctatattgttttaaatatctattcattaagaaaatttcatttggttcaaatctaaattcatcagctaataagataaaatcaaaatttgcattaaatttttcacaaagtcttgagatatttttactaacatcagaatcattatgtttattccttttgattaaaaatggatttgatttttcttcagctttaaaactttccgttggagatttcatattgaagtcatttaaaagttcatttgaaacacaaattatttgatgaatgtaatcagttttactttgactattagaattaaaacataaattagctaaaagatcgatatatttcataccattatcccattgactaccatgatataaatttccttcttcttcaataacatctccagttattgattcaagaacagattcccaaccttcccaatttttagttgcacaaccataataattaccaatcattgacagatttttaatattattacctagaaatacaatacctaatttatcaatcgagttcaatgaatttagtgtaattctgataatcttttgaatagcttgtgcaaattcaaaattttccaatccataatcttcacaatttaccaacggtaaagccataattatgattttaggtattgcttcaggtcttaaaatttgacgttttgagaatttagagggtaaatctaaaccctttgaagttaatttattgacaatttttatatcttcaggaatggcatcatctaattcatcatcaccagttgaaattaaattccatgcatttgttgaaacttgaattagtggaatatttatttctgaaatatctactttatttgaaagtttatttaatataacataccatttatgtcttaataatctattttcagaagttaaaagaattgttggaattttaattgaatttaaatttatgattatatcattcttattttcataaattgaagaaatgaaaacatttgaatttaatgtttgatttaataacaaattagtaccttcattatccaaaataataatatttgattcaaataaatatatttgacacatttcaaaagtatccattttgattgtaatatcaatgaaatcaaataaaattaaactaccaagatttgaataatcaattttagaatctgttaatttctcttcaaaattatttattataatattagtgattttatttttacctataagagttttgaattgttcattattatttgttttcaaagaagtttcaaactctgttgtagaaatattaacaactaaacctacatcatcagtttcatttaaattcattgaagagaattctggagcaaataacactttacctaactcaatatcactttgaaatgaggattgaacgaaaccattttgagttttattaacttttttctcatcaattttcaaagtatttacagaatcatttgataaaggtataattgaatcattttctctatcccaaaaattcatacccatttgactttgaggagttattggattttcatcaagattacttgaaacatcagaatcatgaattgagtaagatggttcgttattatcatcattgtaaggagtaattgtttcaatatttgaaaattgtgaaattggatcaattaaatcacttgtgaataaaacgttatcataattatgtaataattgattattgtgaatatcgaaagagatatttgcatcattattatatgtagtcattttatcacaatataaacaatgaacttcattctttttaggaattggaagaatattatcattactaatattattattattagagatactactattgttaaagatatcattattatcattattcataattggattgagtaattctttaaaacaatcaaaatgtaaaccatgaccacaatttaagtcaataattctctcaccttcaaatatattatgtaaagattcatcacagaatgaacatttactattttgagtaaattttctaatattggtagttttacctgtatgattagataatggagttccagtatgtacatttgaacttgaatgtaaagtattaatattataatatttacgaggtgatgcaatattttcagatagaggggtatttgttaatggagttggattgttaatatcatagttagaattataattaaaaggagagttatttcttgaaaaagttgaatttgcaactgataatgaacttgtcgttgaagatcctgaaaaattcaatatatttggaatttttttgaagttaagttgacgatattcggaatctctatcttccattattgtagagatgtactcaacaagagtagaagcggttaatctatggatatattcaaaagaagatgtacattaagatgaagatacggtaactcagctgagcatttttaatcagattaagctgataataaaaaaagggcaaagagaaaagaaaaagaaagagaaaaaaaaaaaagacgcgcaccgcctcgtttcagaataatacggtttcataataataggtagtaataataatactgggatttatttactctatttacacacacattaatgattatacaactaatctcttgattcccatatatcttcactgctacctctctttaactgttcaacaagtctctttttataaaattcttgaacattaacctctttaacatccaatgtgttaagtgaattagagaaacaaaaatttaatttttcactctgtttatcacataatgtaagatctccatatctgtaataattacgaatttgtccacctaatgacatacattgcattaattcatcaagtgctgtcatacatgacatttccttctatattaaattatattatattattggtatgttaattaaatgttagtatttattcttcttaatctgtaaatattgttatatcctttgtccactacttacaggaaatttactcaactctaatgattcagctctattactagctttgtttcttagtgaactactagattttttatcattaatcacatcatcaagaagtgattccatttgtcttatttcattattatcagtatgtggtccatcatcttttatatcatcttttttacttgtaacatccttcccactatcattactcttatcactattccaaaacattctccttctcttgttgatttatattcacctagataaactctcctacagtagcttacacttaaagtgaagtgaaataaatttaaagtgagatttcaaaaaaattacataatcggtggtatcgtgtacattgcatgggtagtacattattatctacgtttatttacattaaattatatattattaatgatatataccacatgactatttagctaatgaggatgttgcttcacttgtatttgtagttgaaataagtggcggagcaattgaattttcttcatctaatatagtttcattatcttcttcatcatttccaacattttcatcattttcaccaattttaacacaattaccataaacattactcatacctaaatcatcaactacctttttcatcttttcataaatttcttcagttaatcttggaacatcatcctttgttaaaccttcagttggaattggatctaatactttaatattaatttcacctctattaaaattaaataatttcattgaatataaatttgatgtatttgaaacaactaatggtataattggtatttgtgcttgaactgctaaatgaaatgcacctttcttaaatggtaataaaacaggttctgatgaatatgatcttgtaccttctgggaacataaataaaccacctttacttgtctttaattgatctaatgctttatttaatgtatcaattgcagattgtttatttgatctatcaaggaaaaatgtacctgatgcactcataaaccaacctaaaaatggtaagtattttaattgtttcttagctgtaacaacacatttctttgggaaaattctacctaacatataaatatctaattcactttgatgattagaaattaaaattgcaggtaatttctctaaaagttcaggtttatcaatattaattttcatacccattataaaactgaaaaaattataataaaatctagctgtactccattgagctaaatttcttttaccaataattgttaaaaatattgaacaaaggacaccataagttgcactgattaataaaacatcaagtgcaattaacccttttgttaaaaatttaactttctttaaagtattacgcaaaaatgacatttctttttgtttagtctcagcagataaatttccaaaaatagtttcaacaaagacaaagcaagagcaaagaataacaaatcctgttagtaaccacactttgtaaacttagagtcaattcctagacacttgtactaagaaagaaataaaagatataagggtttacaaagttaaataataataataattttttactgagcgagttgcatgatggaaaccgaacaacacagcttttacctttagaacattttgtatcaatatatacaccgaatcagtaatagtaataatagtcattattatattaacactaaattataccatatttatatatatacacgttttgttatcttaaattaatttcatattaagataaatttacatttttctttcaattctatttaattttctagcagtctttgcattagtcttagttctttgacctctaacaggtaaacccatagaatgtctaataccaacataagaaccaatttctctcttcatacgtatattttctctaacttgatttaataactttgaatcaattgtcatttcagataattcttttgtaattgacatagtttgttgttcagttaattgatgcatacgcatatctggatagaatcctaatttagaacataattttgtagcagtttcaagtccaataccatagaaagttttagtaagtccatactgtatattatattaaatgttagtaaaataattcatgaaaaaaaaagaaagtaaaaactcatatttcaaatgacacatacgtttattctatatttacctctaatagccttacccaaaatatgcacaaccattatctaatatagaggtatattgtctcttaacttacaactaaaatcaaagaaataacaccttaaggtatagcttaactattaatattgaaaaattcatgttctcacacaaattttacttaaaaaaccgggtaactcttactactgtaattatctatctttacacaaattgctattcaatatgttgttgtattcttgatatttccatactaacatctaatctaagaattaataacaaccttactagtcctattgtagatataaaactagcaacaccaatggggacgactgcaaatacaactaaattatataaatcaatctttcttttaaatttttttttaactttagaaatttcagtaataccactattactttgatcatttgcattatcataaaccatttcttcattaatattattaatactataactatttgaattatttctattatgattatttgaatttgaacgatttcttaataattcaatactttcaacaacatcttttgcttttgaattgaattgattatcaatatatgaattatttgattggaaacattgtataatgaaaataattgttaaaacacatgaaattaaaatccaaactgttaaacaaaattcattatctgcattattaaatgtataattaaacatttcaattatcattataatcattaaactcatacttaaaattctaacaattgttgccttaatatcatacataatcatccatctaatcattaatccatctaatataatatatgataataatgcactaactaaacaccataatgatgctaaaaaaaattcagttgctctaactgttataacattattatatggaattttaattaatttaatccattgactaattaatataataaatgattttaacattgaataaagtggtatatccctacaaattgtaacaattatatgttgtttaatatttaaccttttcaatccataatcttttaatttatttcgttgtttatagagatcttccattgcagttgatgaaataccatataataaatttcttgatgatccaattaaattatcaccattaccattattaggattttgatgattattattatgaagcctattataactactatttctatggataacaggtatatcttcctcagttctataatcaggtgttggatcaatattattattcctattcattgatttaccattttgtccagggtatattcgttcaatttcagaatctgttggaggtggatgatttgcatattccgaatcataatcagattctaaatttaaattcctaatatgtcgacgcattctcatctcatcactatataggggtatttgtgacatatttattgaatgatattaaaatgtttattccgttatatacactctatatcttaaatgcaattttattgatggcccgttgatgtttcacattttttttaccggcggttgagaaatttagagctcaagatggttatttcgatgagagaaagacgtttgaataaatttgtatgaatgtatcacactcaattgagtgaaataagacgactccttttagtatttataaaataataatatataagagaataaaagataaaagataaaagataaaagataagtaaaagtaaaagggagtaaaaataattgattttttcatgagtttgaatcattatatcaagacattaaataatataagattataaatgcaattgatgtttcaattataataataaagttattattatcagttctaatattattattattattattactactactattattattattataattatttataccattttcaaattataaatcttctaattgtttggaaatttcatctaattcagattgagcagccttgaatttttcttctaattcttcaaatttagtttctaaacttgatttttccttttccattgcagataatttattttctaaagtttcaattttaagatctgccttctcttaattttgcagttgtttcctttaaagttaaatcagaagtttctaaatcttgttctaaagttgcattctttttacttaaattttcactagaagtttctaattgagctgataattcagatgatttcttttgagcttctaattcagtatctaatttttcattttgttcctctaatgtttgatttttagttgttaaagatttaatctcattttccttttctaataatgcttgttctaattctttaattttatcagttgattcttctgctttaacttgccatgattcaacatcaagcttaagcttggtcatcttttctcttaacttatccattgtttatatatactagtaattgatttatttaaagaaagaaatacaaaggaataaacaattcaaaaacaaaaaagaaacatgattcaaatcaaagatgtaaacgtggaaattgtccatgttaccaatgatctctctctaacagcctctctttcagtggcaaatacgcgaatttcaatgtttaccattattattattttttattttatacactattacttacgtaatattcaacatctcttagccctcttaggtgattgtcttggtatgctaccaccagttgaaaagctgtcatccatattcttgactgtctcagctgtagatttagcactgatattattctctccattacctattgatgcctcattcgatgttaaaattgggaaatcggcaagactaatactcattttatcaatattacttaaatcactcaaatattcaattttatgaactttattattgttattgttattattattactattatctgatgattcatcattatcatcacctcctttatgattttctgcatattcatcatcttctcctttatctcttgctgataatcctcttttcatggttgatgaatgtacaggattttttattttattaacattaatgttatgagttgcagcctttaataaagattcagttccattatcactattatttgaattagtattagaattagaattggagttagagttggaattaaaattactactacttgatttataagctttggataaactcgatgcacttgaatctaaattattattactcatttttaatgatatatcctctgatgaatcaacatcatcggatgatgatgaaattactaatccacctcttggattcttattaattgtatctccaactcctgatgctaatatttgttccattaattcaaattgtttatctgtaaatgatttaacatctgggaaaattaattcaaatttaatgattaaatctccatatttattacccttggtattattattattattattaatattgtttgtgttatcatcttcactattcgtgtctgatgaagtgatatctaatatagtagttttattatcatcatatttattaaaatgattatcattactatcatttttactgttatttccttttttgtttttcttattttttttattagatttatcatttttatttgatttaattgatgatgaactttgatgaattggcataccataaccttttaataattttaaatgattagttgatttaatttcacctctattaatgaaaattttaataatttctccattaatatgttcataatcaatataaccaccacaaattgcttgtgataatggtattggtatagttgttaataaattattaccaaatcttttgaacttattattttgtccaaatttatcatcaattaatgttaaaattatatcacctggtattaaatcaataccttcatctgctgcatttggtatgacaattctatatccattactaacacctcttggacctttaaaatcataaattactttagtatcaattaatttattaccatcacattcatcacaaatatatttttttggtataaattcacctgtaccttgacatctattacacatcatttcagttctttgaaccattaaaccatttcttatttcattaacaatatatccctaaaccacaacaatcattacatgtataaatttttagtccacctgtaccattacatttcgtacatttaattctctttgaaagtgataagtttaatatgcttaccataataatagtctaataatgaacaagtttattcgatcttcaatatctttacctttcctcagattatgtgatttattgttaccttgattataattattttcatggaaattcatcattcctactattccttacttgatgattgttatcattataagttagtattatttatgttatcagttgaataatcataatgtaaattcatatttgaattgccaccaaatggtggtgtattaaaattattcataaaatcacttgtcttcaaatcactgaaaaaaattattaaaaatttcattagcttgtgagatatgtgaattaatttgttcatttatatcaaattgattactattgaatggattattgttaaattgagtattgttattattattgttatttgaaaaatttaaattattatcatttggattcttagcgacatcttcaccataattatcatataaatatcttttatttttattacttaaaatatcataagcttcagagattgattgaaaaatttcagttaatctttgcttttcattattgttatcagtattttgtttatccggatgatattttaaagctaatagacgatatgccctttttatttcttgttcagttgcttcagttgaaacgtttaataattcatataatcttgtctctttaaccatgaagaattcaatattttaataaattgtcaaaataattattaattaaataaatataactttaaataacctttttttttctttttctttttcttcttagtttactttgcttattttctttgattgattgatgctatccatgcaattcttttaactaatattataatctttgatttgatttaaataaattcaacaaatgattataaataattgaatcagtggaaaattatcccaatcagcacaaaaattaatgatgactttaaattaagctagttttgtctagtttgtttgttttttttagtttgaataacttgtaagttgaaaactcttcttatttgctttttctatactgctaataccagattggtaccgtacaaaggatgctaaaagagggaagtgaaacagaagtaaaaaaaacgaaaacaatcaaaaaactttaaattgaaaattaatttgaaaaaaattggaagagcaaaaatgaatacattccggtggttttatattgtcatcagttcagcaggaatcgccaccctttttttcgattttttcaattttctcaattttttacattttttactaatatatttactaatacgtttactatattttactggggatttctctactgataacgatgattatagaacatatatccagggacatgtattatagcattgtattctatattacaaataatattgtataattgtataataaatgtgtaatctgtataacgtgatcataaacacagacttccactacagtcccgctaacgatagtctgtaatgatgacgaaatttctagaacgatccctatcaaagtagcagacctcgctgctaagaaacggtgctaagaaaccgttgttaagattgattatgtaatataattattttgattacgtaacaggtcacgtgaacattacataatcacttatgtattacataatcaaaataatctacaaaaatttttctcctaacgccgagacaatacttatttacatgaaaaattaaagattgacatgcaagttccaacaattgatctagaagaattggttgaatcatttgtgtctaccttgaccaatacgaatagtatctctcctctaagcatgtctttgctattcactaatcagtatttaccaaaagattataatttatcttttgttttcaataaactcaaacctaattatactgctaaagtagttatcaatttatcaaagaatatcaactatttaaatgataatactgatgataacaaatcattctctaattactttaaatactacagagatcatttctatttcttctgttttaaaatattctaataaatcttataaattaaaagctgtcactaataaggaaaatgaatcaactaaatatttcactgatgaaattattgaaattgataacgataatatcactgaatcaacagaattttcattagaaatctcatttattggattcaataagaaaaattttaacttataatgatgttacaaagggtgtattctcaactaaatataccaatccttcaactggtaaatctgatttattcttattatcaactcattctcaacctcatttttctcgttacatcttcccgtgtttagatattattaattggaaatgtccaatttctttaactttaactttagattctcaattatcttgtgtctctaatttacctattgaatcatcaaattatatatctgaatcttcaaataaaatcgttaaatttgaaacttctccaccaatgtcaacttcattattttccttctcaattggtaatatggaatatattgaaaagcataatcgaattacctatatctaagaaatcttttccaattagaatttatacaatgattggtgattcaagtagagctgattatgctttatcaattgtatcttctgcaatcgttcaacttgaaaaaaaatttaatgttaattatccattaccaaaactagatataatggcaatacctttcctatctgatggtggtgttgaaaattggtcaatgattcaagttattaatgatcatatcttattacctgattggaaagttaatgatgatcaattaactaactttaaagaaaactattagagatgttttagttcatgaaattgttcatatgtatgttggtaatttaattacttttgaaagttatgatcatacttggatgaatgaaagttttgcaacttttatgtcaaataccataattaatgaattatttgatcatgataattggtataaaattattaataatgatttaactaatttgaaaaataataatatgcaatttgatactcatccaatttttcacttcaaatgttaaatcaaatagaattcatgatacttttccaagaaattcctatgaaaagggtatctttgttatgagaactttagcttctctatttgttgaaaatttcgatcaattaaataatgaaaattatgataaattttttcctcatgattggtgatttcattaaaattaaccaatttcaaatctttcaaaccaatcgatttatggaatttcttaaaatcccaccgaatacaatcatttacaatacgatataccaacaattatgaattcatggattagaactccaggttttccaatcttatcaataactaaagatgaaagtggtaagttcaaaattgaacaacatcgttgtctagattatcctgaaactgatttaagtcaagttgaagatatacctttccaaattcctcttttaattagaagtgttgatgataaattagcgagacaattgatgacggatagaactttgattatcaatgatgatacaattaatgatgatttcttatttataaatgcaaatgaatcagctattgctaatattatttatccagaatctgtatcaaactcaattgctacaaatattactaaattgaataaagttgagcaaatgcaattcttcaaaacttttggtgcaacaattggttctgaatatcaaactaaagatacaattgtctcatttttcaaagcaatcaaattaataaaaaaatcaaataaagttgataaagttgcattctcatttgcattatccattctttcaaatttacataaatccattgcaacattatcatattttgaagatgctaaattttataagaaaattaatctttttgttgatgaattaacaaacaaatatatttcacaatttgaatgggaaaaccttgattggtctaaattaacaaccgaagaactcaaattaagaaattctattttatcattaaaatatgacaattcttcagctacaatcaattggattaaaattatttaaaaaggtaatgcatggtccaaaagattcagtacctgttgaaatattaggttcagttttcaatatattttgcacaaacttgcaatttaaaagattataaagaaattaataagttaagttagaaatccaggtttagtagtcaagaacatcttaaatggtacagataatgacgttcaaactgctgcaatcaattcattaggtttcatgaaaaatactgaacttatctataaaacgttgaattttgttacaactaatcctgatgttaaaatgattgaattagcattattaggtttaagattccaaatgtcatcatttcaagaattatggagatggtacttatctcattatactgtttggtatagtaagtatgctagagatagtaactcatatcaaggattattcttcaaacatgttactgaattagcattagaatgtgcatattatgatccttctttaagaagagaagttgaaaaattcattagtagtagacatgaagatgttaaaacttggtttgaagaagcaaaggcataaagtatgaaaatatcaaagtattaaatgaagcaaactctgaactcaaaaactttttacaatagaaccattaataattaatttgtaaaaactgtaaatagaaaaaaaaatagaattcaataaaaaataatttatgatccgtacatgttgtagtcattatgtgattcaaaaaactctgcattttcaacaccataaactgctgcaatactctctctcagaccaatccataggacatcacttacacccttcttggatcgatcagaaccaagttttaatgctattctagcagctaaaacacgacgtaaatatatctcaagcattaatctcgccaagaaatacgaattatcagataaatcagggtattcttttttaataaaacctagaacttctgtccaatttgaaaacttttgattgaaaatggtagttttcatttcatcataaatttcattacctgttgctatacttacagcaccacaattactttctcttttctttttattaaaatcattattaccaaatgatgctttacctatattagtcttcaatataggtgtaccaaatttatttagatatttctcttgttgtattatcgatacttttcttttcaattcaatgtctttatcatttaataattcattttcatcattaaaatcttcaggattgatatatcgtcttttcacaacactatccttacgtttagtagccagagaacgccctttaccatgacgatatgaactcttttgcgttattttttgttgatataatgctgatgtacttatagatgctgctactgaatcattggaatctccacttttagcagaatatctgtttgtggatttcgttccatcactttttgttattgtagaagaaattgatttttgttgtctatgttggtaaaaatcaagaggggtattaaggtattcatttatggagagatcggttggtttataaactatactaactggtgcagattgtctttgctttttatttaattcaatttcagattttgaacctattatcggcaatgattgatattttcgttgcttactcaatttttgcattgcttcagtagtttctttacttgtatcatttattcttaattcagcttttagaatcttatagtgaatatcagggtttttctttaataaatctaattttttggagaagtattgaaccatataagaaggattttcaacagcacttttatcactgaataaatcaagtactggttcaatttggccaaggttttcaaattttgattgtcttttgtgatttggggatgtttttcggagaatgagaagccggtctttttatgctattaattctataatagttaggccctctgtatgaatttttcctggtaactttaaactccttggttggttttttaccactagaatttggctttactacttgtatcttgtttttgacttgctatactagattgatatataaaatcatttgctgtaaatctattatgtgcatttgtagtatatatacttgcaccagaagatgcatcttgagtaaatgaatggatgtttggaaggttgaataattgcagttgccatgttgaaaagtggatttaacggttatttcttacttgtgaaataaattatggatttatcgacttgtgcaacttcaattcaatcgtggttagttaatagtaaaatctaagcaccttaagttgtttaagaaaagttcaatagtcaagtgctcaaaactaaaagttcatactttgcaaatacagttcgtccaatgacaaaacgatcggttaacctagggtagcaactacaattgagaagaggctggtaccttaattgcctaattaggaaatgtaattaaaaaaagttaaagatacacaatattacgtaatgaaaaaccattttaaagccagcgacgcgtcttttaaaaacatacgtacaccacacaaaaatacacatcaaaaaattatttttattgttgttgtttatgcagaagagccttcaactgatcagttggctcattcacattccacacacaaagacacattcagtttcatcaattacaacaatgtcagaagcgaaagaggataaggaaaaaaagctactaccaagtaaaccgaaaaatggtaatgatgcctccaaaaccgataaacttttacctattgttcaagtttatatcaagaagttcgatgataagcttgaagagatgcttgatgaatttgataattatgattatacctataaatcacttttaacccaatctgaatttcgaagaggaatttttgcccattttcaagaaagtgttaagacgaagtaataagtatgatttgatctttgcaatgtttgatataatggtaatgaaatcattgaatgatttacataaactattatcgttaattgattttatgataaatatttcacgttatgatccattctacatttaaaaacctaccaaacgatattgttgccaaagttgcagaggagtcaatttttcctaaaattcaagaattcatttataataagggtagaatgaattatccatttaataatttcattaagcaggcaaatgaattatcaataaatgcaatggttgaagaaatagacagtgatgatacaaatgaagaaagacaaagaagtgccacacctgaagttgacaatgaactagaaataaatacaaataaacgaataaatgatatatcgttagctgaattgactaaaaaaattatgagcaaatccaaacctaaatttcaaaaacctaaaagcggtgaaagattttatgttagaacagaaacaccggattatgatgatgctcaaatattggaagaatatgaatccgaatctgataatatttcagttccatcagataactcagattcagattatgattcgaaaataagcactaaaaatattcatgtgggaactaccaaaaacttaaggaaaagtacattagaacaattagttgactcggatcatgagattgacgtggatagtgaaaaggatgagaataatatgaaaaagggtaaaacaattgttaccatcgacgatgaagaagaagaatcaggggaagaggaggataatgaagatgaggatgaatcagaggatgaatcagatgacgagattttaaaggatgcgatagacaatggtatgactaattccacttccattatagaacatatcattgaatacgaaaatatgggatcaggatcgactgaattagcgtcaagaatatcaaaatcaaaaaagaaacgtaccgtcgagcaaaagattagagaatcagatactttgaaaaaacgtaaaatatccaaagagaagagcatcaaatccaaacaagttaaaaaatcaaaatctaaaaaagaaaaatcatctaaaagaagatcatctgtcagaagaaaaacatattatgtcttggaaaagacattggatttcttgtacaccgagttagaaactcatctgccactatcaaagagtactctattaaaacctgaagttaaagggtttagctataaaccagctcaatattcattatttgctaatttacccgaatcaattacaaatacagattctgatatcaatgagaaaattgataacttgctcaattcccttattttccaactttctaaaagatgtggtggtaatcaatatgacacaaccccattcttgcacccatttgaatatgattatataatgaaaaatttgccagaattatcaaaaaaagctacaaaattgccaccgttcattttttcagaaaggtttagttcaatgtttggatatgacaactatttgagtaaaaatatcgatcttttaagaataaaaaacacaaaaattaaaggattattatggcttaaggtatctttaacagaggatgagtattttaacatgtttaagaagattgttcctcgtgaaaaggttgctcaaaggattgaatatttaaacactattataacagatggtaaaaatttatacttcatagatgttttggattctatcaaagttgcgatggaaaatattccccgattaacatatgattctgaagatgaagaggacattttgagacaacaagaagaaagtaataagcaatctgaaccaagtgtcccagttgaaattgcagagaaagcactcgaaaacacagagaaggaggcagaagctgcgtctgaaaagactgaaagtgatgatgcatttgaggatgcacaagagacagcagatcctgaccctaaatcaaacgacccacccgaagatatagagatgaataaagtagaacccgcttctgagaaaacaaataacacagttaatcctctagaatctgaagggataaaaaatgatgttagtactcataacattaaagttgatgtcactactgctctcactaatttaggtgagaaattgactgaagatcatgccaaccaagctacagaaattgcatcagatgcaaatattgacaaaaatgagaccgaaaaaacagatggcaaaactgttgatgataaaaaagaaaataacagcacagatcctaatacattaaaaaccacattagtggatgaaaaatcaggtgtagaaataaaaatcgattccaacagttctctcaacgatccaagagaatctgtttattgttcatcaaagggtattgcattatcaagtagatctgttaaaaaagttttatcaactcaacaattgtttgatcttttagcagcaattttctttcccgaatttaaatttaattcaacttatccaggtattccatattctagtttaagaccattaagtgaagcatatgacccattaagaccatatttactttcattactacttcaagatgtttatgagttttcatcaattccaaaatattttaaagttgatagtgttgtttttgaattacagattcaagagttaattaagtcaggtcaccctaatgataacatcaaacgtataacagctaaagttctggaatgaacacaaaactaatttatagaaaaattgtataatattgtatatttaaatttatgactacataagatcgttcgatttcagtaaaatatttctttagattaaaaataaacaaaaataaattagtaaacaaattaaaaacaaaactaatgtacatagagatacaaacaaaatagtataataatagtataacaaaacaaatcaataaaacataaatcaacgaactaaaacattctcattaattaaaatacgtctgacttcaccaacaagtctagaaaaactctttgcagaacctttttcatgattgaatgttatctttgatccattaggagaattagaaacaacacatgtaaatttacatgatttaacatttaatgaattattctttgcaatctcaccctttaaaacattacggcctgaatcaattactaaattaccaatcccataatgactccaaccggaaagtaatgatttcaaagcttcaaaagaatcttcagttgaaaggatagtatgataagtttctggtgatgctaatgaaccttgaagccaaataatgatttaagtgttttaccaaatgaacctttttctttcagtaacaggagttgcaggttgaatttgttgactcaattttgaaaaaattgatgatttacgtgcagtattctttgtttcattagactcattcaatggttgacgttgtttttcaatattaagaggttttggtgcttcagcaggtaaaactggctgagatggagcttctacaactgaaacaattgatttctttgatggaacttcttcaaattcttgctttgattttctgattgcatcttcaaaaacttcgaatgtaccatcacttctcttggcttgacttgtctcttgactggagatccagggaacaacctggaacttcaattagcattatctagcagttgaatcattgttgaaagaatcttcaatctttggagggattgcaggaacaggtgaataaactgatgatccattagttatattacttgattctgccagatactcattattgttatttccaatatgtttcttttcagttattaataggttgagtagtagctttttggtttggatcaacaaaacataattcattatcaaccatttttgaaatacttgcagatctaggcttaccaataaaatcatcatcttcttcatgaatatcaatttcagtttcttcagtattatcttcatcatcttcatttagtgtattcatactattactatgattgataacatttaattcacttgttctatcttcttcttcaagtatattttcaggttcattcataatcatactcattctagataatctatcctttttagaaatggttttattctttgcaatttcttcatctaattctttcaaatagaagcttaatctcttagaagaagttttagttgaatacattgataaattactataacgatttgattttaattgtgaaggtttcggtggattgaaatagtcttcattttttttcaaaactgtaccacttgataatcctaaaccatgattatcataagttttatcaactaattcagcacctttatacttttgtttttttaataattcaagtttttcttgttcaatccttaattcttcttcacgttttttaatttcagctgctgccttggcttcagcttcagcctcttcttgcatttttaataaatgtgcagtatgttgagatgttctcttttgataagtttcataagctttatatcttggatctaaacgtgaaattggttttggtggttcaactaaattagatttgatttgagtatgagaatcagatgctgtacgacgttcattatcttcaaaatcattagcatttaataattgtgtgattctttccgctggattacttgaattccttaactttttggaatatctgttgttttcctttaatgctgatttaattgcattactagtagcaggtctaattgaatttgatggatgatatgatgccatatttgttgataaacgttttgaattacgatttttcttgttaccgaaaacaattgcattaattgttgccattgattcagaatcaggaattttaacatttgatttactttcatcattaaatagcatatcacataatgcagcaaaatcagatgatgctcttttaccataatcttcaacatttttctttgaattttcatattcacttaatttagcataacttgataaaacttttgaagtaactgaatttctctttaattttgtatttgatggtctacttgctaacattttttgaagatttgaagtttcattaataatctttgaagatctcttagttggtgttgtatcaattgcaattaatgaacgacgcttgagatcaatattggaagatttagatggtgttaaactaaatctatcttgttgttgttgttgatctaaatgttttgaaccattctttgaaggacttgaatcatttgaggatggtggagtcattttagaaaatgttaatgaatctcttgatcttgtatttcttttatttgaaaatgaaattggtctattagttgcagtagatgcagtatatgataatctttttcttggggtactattaggattcgaagatgaaggtgaagaatgtgcaattttttcagttgttttagaaatgattgaagaagtacgtactaaatcatcagcatcaatcttaatattgttaattttttgttgattattagtagtattaccagaatctaatgagtttgaagaatttgttgtcttattattcaaatgatcatgtctatatctcaaaagtaaggagtaaaatattttttcaggatttgaagttggtgataataattgttcaacaattgaatcagctgaacgaccatgccataaaataaccaagttttccaaaattctttgatcaatttcatcctttgatttaactggactaattgcagcttcaggtgaaggtagttgcataaaatctgcatcattttcacaattataatactttttaacaaatggatgtttcaaaatatctttagttttaattctttcttcaggatcaactgtaagcattttattaattaagtcaattgcttcaggtgataaaggctcaacaatttcaaatttaccaacttgaacttttaataataaatctctgatattatcatcatcgaaaggtaatctaccagttaaaagagcaaataagataacaccacaagaccaaacatcagattcagcaccatgatattgtaaaccactaataatttcaggagcagcataatgaggagaaccacaagaagtttctaataatctaccactttctaaagcagccataccaaaatctgcaattttaacatttaaatctttatctaagagtatattttcaggttttaaatctctatgacatattcctaaactatgacaataaagagcaccaagtattatttgactgaaaaatccaactgcagtatcttcaggtaatggtccactatctactaataaatcaaataattcaccaccttcaacatattctaaaactaaatataatgctttttcagtttcccaaacatcatataatcttaaaacatttttatgatttaataatttcataataatgatttctctttcaataccataacttaaaccagctgaatcataatcttgttcttgttcatgttgacttgttccattttcatattgtaaatcttcagtattttgagtttgatttggatcatttgacaaagaagattttgaaacaattttaacagcagctttttgatttgtatctacattagttgctaagaaaactctaccatttgcacctttacctaaagttttacctaatttccaaggaccaattttaacaggatttcttttctttggagatatcattgaatttgtattacgagaacgtgcactagttgatacaactgatgaagcgaatgagggttgtcttgaatgttgtatcatcatctataatgaaaataaaaaagggaatgtaatttgttagtatactttgttatatgtatggaatatgatatttgagattggaaaagtggaaaatacttactttgtgaaaataattgaattgatagttttatgagagatgtgatatacttgaatgaatgaatgtaaaaagttgggaagatatctaatctatctatctattgtaaaattaataataatttgattaattgaatgaaacaaatatcaaactgacctttcaatatatagtgttgttggatatgagttataccgaatgataggtaggttcagtccaaaaagatattggttttcagaaaaagagagatagatattgtaaaaatgggaaacaaattattaaaatcaaataaccaaaactcaaattactaaagtcaaaaagtaaagaaaataataacaataatactcgtgaaaactgtaaatatcataatattgtaatcaattcaataacctacccctagttgtacactaaaacaatacaatttaagagtaaaacgcgatatgtcctaagaaagcgcgtttataatactaacgcgtaaattgtaacaatttcaaaacattttttacgcgtcaaatttttttaattattggtcagtagtcgcgcctgtgatatagtcgcgtctatcattacgtaagtgttttatttatttacaggatggttactgcataataggtgtagtatggtatttattagtaatgattatagggggggaagttaaatatacactgcattgataacattctattagaatacagttattaaaataaattgctatcaataagggagaaaagggatagaaaaaaaatattaaacaattatacatacaaattatacaaattaaaatgcaccaccaacttgttctctatgagcttcaataacatcaccttcatccatgtctaaactttctggtgtatcttctggttcaactctttgaccatcatataaaaatcttaaactatttgcttgacgaccttgtcttttacagaatgcttccataagtctctttaattgagtaactttcttaattttaaaataaacttctgaactaccatcagtaacttttaaattgatatgtgtactatctgctgcttctggttttggtgcctcggacatctttattatattctatctgttgtttaattttaaaaagaagtaaagaaatctacaattataaataattcagaaaacaagatactgataaaacaattatgtaaatccaaagggaagctcagctttccaaaacaccaaaaatgcgaaacctcagatttgatttataaaataaatttaaatctatgaatatgaatcgacgcagccgacccttagtatttcctaaataggtaatattatctcttcttcaccctctaaatccttcaaattgtaataatgtacaggaatgacaactgatagtataccaactatagtaccacaaataacatcattataactatgtttaaaatcataaattctactagtaataacatcaattgcaattaatattggtgcaaaacataaaaatttaattattaaattcttattattatcattctttaactttttaccatatgaatgatataaccaaattgataaaaataacataccacacatagaaactgatgaatgtccagatggacaagatttatatccatctttcaaaataaactctccgaaaggtgctgaacaaatttcatccccatataaaatactagttttcatttcatcctttttcaataatggtccacatcttgctaaaaaatcaggtcttaatttagctaatctaatttttgtaaatgttgttaaaaatccattaatactcatacaaaatataaataatgaaactgtatggtaaaatcttttcactttattacccttcacttgatcaactaatattaatgttgtcattacaattaatggtaacaatgcacttattatcactaaatttaaattatcatatttctcattaataacaaatggataagagatagctatatcatgaactgaaaatggtcttgtagcagcttgtgcaaatacctccatgtatactgaacttgttaataatgtgacgttaataccccataataataaattctccttcactttttcccaaaatttacttatcagatctttcaattgcatttgattacttggctctgacaactctgaagcttccattttatatatccaatttataaatcttctatgtggggttttacaagaaaaaaagaaaagatcttgataatttgttgagatcttgaaattgcatacactttgacaagcagcgctttaagaagacaaatcaccgataattcattaattgtacaacttcttcactttattctaatctgaatcgttaaattataaaaaaaaattatcacagtacaaagtagtatacatgtttaattaaataactgcatcccagaatttatccatccatgatttattaggattattgtaatcttcatcatcttcatcttcccaaacttcttctgcagcttttctagcttcagaatcaatatctgctgcatctaatggaattagccatggttcttttctataaactgtaaattgtgctgccatccaaaatacaaccaccataattaatgaaatataatttgcaaagaaatcattagcattaaagtcaaaaaaaactgcataaccttgaatgaaaacaattaaaacaaggaaaaattcagtaaaccaagctacagctggtccaattgaacatttatatggcaatgtatcacgtgaaatgtttctagatttcaaaatgtccataaatcttaaatgtgctgctgtaataaaacaccagcaaattaaacctgctaatgcagaaatattcattaaccaattgaaaactgtagtaccatcattggaaacatttaaaaatgctaatgcaccaaaaacagctgtacaaaaaacaccataaattggaacaccatgactattggtctttgcaaaaaatcttggtgctgtattacctgccattgaatataaaactcttgaaccaatataaacattactattagcagctgaaattagtgttgttaaaataactgcattgaaaatatgtggtaaaactggagtacctgaattagtgattgaaattaaaaatggtgatgatgcaataaaacttttatcagaacttaattctggatcattatatggaactaataaaccaacaaagaataatgttaaaatatagaaaagtaaaattctaacaataactttgttaattgcctttgggactgtctttcttggattagcactttcacctgcagaaataccggttaattcaacaccctgataagtaaatgctgcattaattaatgatgaaacaaaacctaaaaatctatctgttccaacattacttactagacctgcaccggcaccccaaggacctggatgtctccaatatctaaaaccaacaggaccagtaacaccagcaccacaaaccatacaaagagcataaattaagaaaccaacaattgcaataactttaacaaatgcaacccaaaattcaatttcaccataatatttaacaggaacaaaattagccattgtaattgtaacatagaaaattaaaatccatgcccaaactggaactctatcagtccaataaaggatacattgagaagcagagaaaatttcaatagcaaaagtaatagcccattgaaaccaataacaccaatttgaactaaaaccaatagattttgatagatatttagtattaaaagtacagaatgaaccagcaataggtgtatgagtagccatttcacctaatgattgagtgacagaataagctaatccaccaaagaaaatatatgcaataagtgtattaacaggacctgccacttttaagtggagatgaagtaccaataaataaaccagtaccgatagtaccacctaaagcaatcatagcaacatgtcttgatttaagaccacgtttaattctagtttcatgaacatcaccttcaacttcttcattaagataatcgttgtttaagtcataacctttattataagaacttgaccatggagattttttttcttcaatgaaactgatattttcattttcttcaggtgaaggattactgttagaagtttcagtattcgttatatcttctctttcagattcgtttttaggttgactaaacttctttaatctattcagtttccttggaagggccatcttgtgaatattggactttaattaagaaaatttcttttgaaaacttattccagtacagagaatcaaacgttgaaaagcaaacaagttttttctccatcaaaagattttcatttaaattgtgaataattggaaaactttgtcataaatttttgacacataatagcattggtttactccgatatataggaaaaccgtgtaacactataccatcttaatggaaacttgtaagtgtaaagtttccttttggagctccattatagtggaaaatctttacgccgcctggaatgccaataaattttttttccttaaattttttccctttaagagtatacattcagcgagatcattccaataggtgtaagctgcaaatttctgcagtattagtaagtaattattatattcgaatgacctttaaaggaagcctctagtacaaactactaatagaaatagttaatgattacaagaagaggatacatgcaacaatttataactttacttttttaaattttgtcttgattacaatcaactccgtgttaactgggatgttgaaagtcaaatacattgaaaacgtcagtaatacagctgttacttgaagttagtggatcaaaatacatttttctaattccactaagtaagccattttttagtatgtccactaacgtttgtcagaaggtattccttgacgttagtggacattttgtgtgaagtccgtgaaagcaatttcgcacaatttgcaaatagcttctttcaaacggcacaaagttttttttttcaacaatagtataaccgttttgtgtcaaaaatgcctgtcaaaacttttttgttttggtgcacacctttaatggcagttcacagcgagtagttgttgaagtggctttttacgtaactgctgtttcctctcttgtgggatgtaaacttacttgagctaatcaacttccgaggataaggaaatgccatgtaaaggaaagcggccggaatacgtatatcagttaatagcgaaacgtttaaactaacggcccggtaagtaattccaacttacaaaatatttagtttcttttcaacaatcggttttgataacagcggttaatcaacaatattgtatttatctatattattactatatgcactaaatattattgtacaatttcgaaaaagtgattttagaattacgaaattatcggaagaatttttgaaataaactgtaattagaaaagcatgtaaaatataaactgtatgaatctataaaaaattaaattaaataataaattgagatgattataatataatgtcccagaatttatctaaatacagatactttacttaattgttcttcatcatcttcccaaacttcattatcaatttgtcttgcatcatcatcaagatcaacttcatcacatggaattaaccatgattcttttctgtagaatgttaattgtgcaacaatccaaaagacgacacacataattaatgaaatgtagtatgcaaagaaatcacttgcattgaaatcaaagaatactgaataaccttgaatgaaaacaattaaaacgaggaagaattcggtaatccaagcaacaactggaccaaaattagccttaaatggtaatgtactacgtgagatatttctggattttaaaattgccatgaatcttaaatgtgcagcagtaataaaacaccatgaaattaaacctgctaatgcagaaatattcattaaccaactgaagactgtagtaccatcattggaaacattaaggaatgctaataaaccgaaaagggaagtgaaaatgacaccaatgtaaggaacaccatgtttattagttcttgcaaataattttggtgcagttgaaccagccattagaatataagaatacgggaaccaatataaatgttagagttaccagcagagatgattgttgcaagcatgacagcattgaaaatacttggaagaacaggagtacctgaatttttaattgcaataaggaatggggatgatgagataaagttttcatcactgcttaaagctggatcattgaatggaactaataaaccgataaagaataatgttaaaatgtagaatagtaaaattctaatgataaccttgttaattgcctttggaactgtctttcttggatttgatgattcaccggcagagataccagttaattcgaacaccttgatatgtaaatgctgcattaattaaggaagaaacccaacctaaaaatctatcagtgttaaggttagaaactaaacctgcaccatcaccccaaggacctggatgtctccaatatctaaaaccaacaggaccagtaacaccagcaccacaaaccatacaaagagcataaattaagaaaccaacaatcgcaataactttaatgaacgcaatccaaaattctacctcaccgtaatatctaactggaacaaagtttgcaccagtcaaaataaagtagaaaatcaagatccaggcccatttaggaactgcatgagtccagtattcaataacttgaccaacagcaaataattcaatagcaaaagtaattagcccaagagaaccaataacaccagttagtagagaaacctattgcctttgataaatatttagtattgaaaagcacagaatgaaccagcaataggagtatgagtagccatttcacccaatgattgagtaacagaataagctaatgcaccaaagaagagatacgcaataagtgtattaacaggacctgataaacgaagaggagtagaagtaccaatgaacaaaccagtaccgatagtaccacctaaagcaatcatcgcaacatgtcttgatttaagaccacgtttaactttagtttcaattatagaaccttctaaatcatcttgagattctaaatcaccattatcataaggatttttttctttaaaatttgcacttacttcatttgacttaacaggatattgttcattaatttgatagtcaggtactttcatattgattattaaaacctgatatagttgattgtgagctagaatcagaatttgagtctttcttattagattttgaaagaacgttaaacttcatattgttttgtggaaaataaacgaagttttgaaagttgtgttcgtgaattgattgggtgaaaagataaatttaagaaatgataataaaatataataaggagtctgagagaagatgaagctagaaagaaagagatgggcagacagtaacctttatatatcaagagtagaaaaagcagcacaagatcgatgcaacaattaatagaaataagttaaattaattagcgaaaattcttatctaaaaatgacaaagtcataaaaaattaggcttgtagaaatatatgttcattattttctcgtttctttttatgtgatttgatgattcacttttagtatctttagtgtatcagattacttatattttgttatagaatagtatctaaccactctatctaaaccttaaataatcaattaattctgtagtgtaatttaaatcattaataacagcaattgaaacctcagcaaattaaattataaattatgagtaacagcggaaaatgctgtcaagtcaccgtaaattgaggtggcattaacaacctttaaaaatttttttcggtgacagcaattaaaaaattttccattccctttacataagcgaatgagtatatggtgatgaattgcgatgactacggagttgataagataagtaagtccgagattagatagtaaagataagagttagatattatttagttacatgtactgtgtatttagatgaagatgagtaaagtaaacaactctgttgagcttcaaataaaagttgaatatggtacatgtccactaaagtttggtagaagccataacctgactttagtggacaaattaaaaaaaatatcgcgaaaggcatttctttttttttcgtgccgtttttaaggcactaagccaatttagtggaatggctttcctggaaaaagtgccacttcaattaatcgggtgtttccgatcttacccagaggaggtcggtaatttcggtgttgtggtagtatcatcaatgatatattagcattaatacaattataccaatgtcaacattaacgagccgcctataagttctatgatctactcataaaattatcaatttttctacaagaagaaaaaatataagcataatcaccataaattattattagtacaaaaatacgtagttacacgatagcattaagtataaattagctattctataaaattaaatcccaaaatctatccagtttagatttacttaattgtgcttcatcatcttcccaaacttcattatcgatttgtcttgatgaatcatccagattaacatcatcaacaggaattagccatggttcatttctgtaaagagttaattgagagacaatccaaaaaacaacacacataattaatgaaatgtagagtgcaaagaaatcatttgcattgaaatcaaagaaaactgagtagccttgaatgaaaacaatcaatacaaggaaaaattctgtaatccatgcaataactggtccaaaattagctttaaatggtaaactatcacgtgaaatgtttctagatttcaaaatatccatgaatcttaaatgagcagctgtgataaaacaccatgaaattaaacctgctaaagcggcaatgttcattaaccaattgaaaactgtagtaccattatttgaaacgtttaaaaatgcaagtaaaccaaacagagatgtgaaaataacaccaacaaatggaacaccatgcttattagttcttgcaaaaatttttggtgcagttgtaccagccattgaatataaaatacgtgaaccaatataaatattagagttaccagcagagataatagttgcaagcatgacagcattgaaaatacttggaagaacaggagtacctgaatttttaattgcaataaggaatggagatgatgagataaagttttcatcactacttaaagctggatcattgaatggaactaataaaccaataaagaataatgtcatgacataaaataataaaattctgaaaataactttattgatggcttttggaacagttttacgtggatttgcactttcaccagctgaaatacccgttaattcaacaccttgataagtaaaagcagcattaataaaggatgagacaaaacctaagaatcctatcagtagttaaggttagaaactaaacctgcaccatcaccccaaggacctggatgtctccaatatctaaaaccaactggaccggttaccccagcaccacacaccatacataatgaataaattaagaaaccaacaattcgcaataactttaatgaatgcgatccaaaattctacctcaccgtaatatctgactggaacaaagtttgcaccagtcaaaataaagtagaaaatcaagatccaagcccatttaggaactgcatgagtccagtattcaataacttgaccaacagcaaacaattcaatagcaaaagtaattagcccaagagaaaccaataacaccagttagtagagaaacctattgcctttgataaatatttagtattaaaagcacaaaatgaaccagcaataggagtatgagttagccatttcacctaatgattgagtgacagaataagctaatgaaccgaaaaaaagatacgcaataagagtgttaacaggtcctgcaactttaagtggagatgaagtaccaataaacaaaccagtaccaattgtaccacctaaagcaatcatagcaacatgtcttgacttcaatccacgtttaactttagtttcatgaatggaaccttctacatcatcttgagattctaaatcatcattatcataaggatttttttctttgaagcttgttgaagttatttcatttgatttaactgggaattgtgatatatcatcataattagagagaccatattctatttgagattcagaattgtaacttgatgaattcaaattattttctgaagtgctggaacgaattttagaccacacctttggctttagttcgtttaatttcattcttaggggtatttaaatatttattgtttataaatgaacgataataaaaaatatatttacaataaaaaagataatggagaatcaactagtttatataaaactgaaaaaaaatttgaaaactaaacagaattttgatagtgaaaaaataaaacggaaaaattaagcgcgcttattatgggatgaatgttgattattacctaaaatgaaaatttattatgactaaatattcattgatcaattctatgattggtggggttttcttgattgttaaaaacggaaacaagcgcttagagatagggagattatccgaaagtgcaaatatggcaagttactataaatttattaaagacatttacaagtttacagtaacaaatattgtgcagtggtttctaaaatagcgttctaatttttttgacagcgaaatgtgtcaaaagttaaagttttcacgatttttttcaactccgaaggtcaaaatgtgtgataattagagtatttttaagatactgtaaaattgcatatttcagtcaagatacaattggatataatctttaaaaggcgattcatattttctgtatataatataatattgaaaattgaaaataaagtcccccccaaaatgtgaagtgattaaaatgtaaaaaaattccactaacgttgagtagcagctaacacttgtcgttagtggaataattttttgttcagcgctaacgccgtttttgacttctccgtttgatgttttttattgaactggttctcttactgagtagtactcatcttgctctcttagacttgccaaaattaaagaatgtagttggggtgttttgtatttatattggaaatcaggagggattaattgattattagatagcttatcgtgatatctacaagagaattgttatccaaatataaacaattatcacggcccgaaactttagggaatgaattggttttgtttattagattgttatttgattgatttagaagctgtaccaattgatatatgaagtataaagtgtatagtctaaacaaaggttattaataattgacaaattgttgcttccaatgattttagtctcggcaaacattcctaatttggaaacacatcaaaagtcaaatctgttaacaaagtaccaatcagagaatggattcaaggtgttttctttttgatatatacgtagtaaacatcataagatactgtattagatgattaccatacccagaatatttattagaaactttaaaaattctacaataagttttaaagaacctttatttacttcatcatcgaatgatatatccaaatatttcactataacctttgcaagaagtcaaggtgcaggtggtcaacatgttaatactactgattccaaagcaattattagattagaaagtaaaaattggtattcatctcgtggtaaatggattccaagtaaggtatttgataatataatgaaaaactttaatgacaaaactgctccaatccataaaaaatttcaattttttacacaatctggtgatgtattaataacatcaagtacaacacggtatagagataaaaatttagaagaatgtttcaataagtttataaaagcagttaatgaatgtggcgctgaaaaggaagaagtttcagaggaaactacaaaacattgggataagttaaaaaaacgtgataatgagaatagattgaaggataagaaacagaagaaagataaaaaggcatttagaaaaaaagttagtatctctgattattaaaaaatagattaatgatgttaatatttattatttttatttataaaaaaggaaaaaatacacatgtgatataatatgagacaagataatagaaataggattaactatttaacgacatgaattccacaagatcttgtattgcaataacacttgttgccatacccaatggtccaattaaaccatcactaacagtaattgtaccatacatattacttgcaattactaaatcaaatacatttttaacaaaatctcttctgattttgcttaatgacattaatggtaatttgtgaattttcttgtcatcatcaacttctttattgacaatagcattagcattagcattagcattattatttacattattctttaatttcttttgttcaaaataccatcttgaaataattatttgaaattgtcttatatttttagcaataccaccaattaacgcaattgaccacattaaacctgcatatttattaatatttttaattaatttattttgacctaatttttcattaacacctttaccaccaagaagtcctaacattttacccaattgtatgatatcacaagataaaaataagaataaacctaattgtttaatagcttcaccatatcttagaagtggatctgataattgatctgatacacaagctgaaaatccactgagatgatttaaaggttttaaaattctcaatggtttcctcagaagtgtaaacgcttgttgtaaagaagataataactgtgcaatttcaggagagaatgcacttctaaacttccaatatcttaagaatctcacaaaatattgtagtaatctgagtaacttctctcttgcttcaacagaattagcaaatttaagtaaatgcttgtaagccggatgttgtactatcagttccaaggacattgtttagttgttaataagaagtagcgtgaaagaaacagtgattgtatatttcaacccaataccagtcccccttgcctttataaagataatatatctgaagtagaaactgttgtagttgtattaatgaaccccacagctgattgattgtcgttttttttttactattatcagtgatttttttactcgatggggcgaaaatttcagagcgcccgtaactgaatttctgacataaaatttagtcattttaatgattaatgatttattagtagtcacttaaactttttccaattgtttgaatgaaacaacagatatagacacatattcttaacaatggaacaacctccaattcaatacccacttgtatctatattatactgcgttaaatgtaattgggttttacgtgcttcgtggtatcaacaagaactattacaaacttttacatcaaaggcaactacatcagatgatgccgatattagatctgtattattaacaccttcctatatacccggtactttcaaagtttatgtgaaaaaggaagaaaatgcagattggattttagtttgggatagaacagaaaatggtggattccctgatgcaaaaactttaaagcaagaaattagaaatatagtatctccaaagaagaatcttggtcattctgataaaaaatctgtgaagggagtattggtatctcatgatacgactccaccagcacctactagaaaattatcatcacagggaagtaatccaattacaagaataaaatctcatgaacctacacaatctgatttagaaacttatggatctccaagattagcatcaagtcataaaacattttgtgaagagtgtttagatactttaccacctgcttgggaaatgtaattataatgatattaattaaatacaatttcttaatatacaacacactatagcaaaatattacatataaaatcttatttataccccccaataagaatcactcaaattatcaatatgacgtccgaataaacgttcatatacaacaacaaaaacaaaatttaaaaccaaaaaccccgtcagaacataaagaggaagtttaatcatattccaggtgacaatatacaactttaaaaatctcatcttgagtttcccaatgattccactactatttccatctccaaactttttcttcagttctttaatcaatatatcttgtttctctacattatcctttaatctatttatcactttcttcttttgtatacttctttctttaatttgaaatttcatttctagatatatttaattcatctaaacttaaaaggtactctattaacacatttttcattttatcaatggatctataatctctgatttgattgttttcacttttagataccatattacgaagttcttgtattcgatctctcaatatttgttcctgtacatcaatgggttcattcttcaaaaataaattaaatttcttactttcattattcatcgtttgtgtgaattcttcactttctctgtaatgccctccagtattattcccatatttactattatcattcaaactgtgtctgtgtgtaattataatctgatttcccaactaatttcccatttataacatcgtgtattggacattcaaacaatctttccattaatgaattgaattgttccttatcaacctcagcagatggacattccaatatgaattcaattaaaaaattcttatattcagtagataataaatttttaccatttaatgattccattacatcaaaaagtgataataaattagccagttttagtttaccataagctgaacctgtaactctaatccatgattcatataatacctccatgaatactcctactgattatcatttgtaatatttctgtagtaatgataaataaaagaagtaacatcaagagttgtttgttgttccctgttcgagaaagagaaatttgtttcatttccaacataaaaggatgtttttttcattaatatttgaactatcatactttgtttttaacacaactagaacaaccagagttaacattgaatcattcaaataatattgtataaaagtcaagagaataatgagtgatcaatattctataccaaaacgaagagaaagggaaaggcctagaaatagagacagagatagaagaggtggaagaagaggcggtagaggaggttttgctgccggtattagtagtagctctagaggaggtaggggtgaattatgcatatgataataatgattggagttatggtggatatactgaaagttcatcatattatgaaccatcatatagaggtgattatagtaaagattatcaatcctcaaataggtttgcaaagaacggtgaatataactgactataattatcaagaatatcccgattatcgagattatgacagaacaaaggagagacctgtagtgaaatcaaatgagaaatcacaggaaagaacagtgacagaaagaccaacggacacaccacaaggaccaacaagattacttcaaggacctcaaaggcgtatagatataccagcaaggaccccaagggcgtgtagaaagaccaaaagagaaacaagcaagaagcaattaaaagatacatctcaagttaaagctcgagaagaaccacatgataaacaaccttcaatcgtagatgaaataccacaagttgtaccacaagtaatccccgtggaaacaacaatagaacatgcacaagaaaaaccacaagatagaaatatacaagatgctacaaccacaaaagtttctacagacgattcgaaaaagaaagagaaagaagttatatcatttaagaatttcaagttaagtgaaaaagataaatcaccatatgccgatgaaataaagctacagaaagatataatggaattaggtagacgaattgccaaagaaaatgaaaactcaaaaaatggtttaacaactgaatcaaatatactgaatagtatacagaataatataacggatacagacaggactataagcaacaaagaaaacctaggagacttaacgaatacacataagataaaggaaactgaccagcaaagtattgaaagcacaacacaaactgaaattgcaactaaaagtgccattgaagctttaaaggttgatcttgccaaagaacaaagacaattggtagaacaggatacaaccgagaaagtgaatggtaatacagattccattaaacaggaaaactttgataatggttctacagatcaatattcggataacgatgatgtcagtgatgcaaatagtgatgataaaagtgtgattaaacaagaattacaagaatttaatggaacagtgaagaaagaaccagttgatgttaatagagaagtaaaaaatatacaagctgaagaaaatgacgaagaagaagaagaaaaagaagaagaagaagaaaagacgaaaaaggagaggaagagaatgaagaagaagaaagtgaacaaaaagagaatgaagaagaagagaatgaagaaaaagaagataacgaggataacaatgaacccaatcagatcaaaaatctaaaaagaagattagataaaagtaatgataacgatgaagagcgtttggaagacgaaccatacaagcgtagtaagaagtcaatgcccacggaagacgaccctgattcaataacataccattatccagagcaaaacagtctacaactttatagagacagagaaactcctaattttaatacaaaattctctaacggggttgatattcaacttcccgaatccttagttaacaaattctttggatcatatattccttaaagaaatacattaccatgatcaaccagttatcaatatatggaattatttcaaaactgaaaattattcgaaatctttatcacacctaaatattttcagatttgatcatacattaactgcaacttattcgccaaatccacaactctatacatttttaacatataaaaatatagatagatttgatagaaaaggtgctttctataattggtattcccaattcttacctgatttagaacttacagatatgaatccatcagacacctttgaaaacccttagctgaacaggaagaattatgaaaacatgaattgttatgaagggttaggtggtggtgaaaaaaattctgaagaatcacgaaataatgataatgaaacagaatctattaatgattcattagagaaattgaaattatagttggagtttaacaatgttaatgatggctaaaaacgcatcattaagttcaacttcaagtaacatgattataattgatagaccaatgttaaataagaatgcatttcgtgaagatttaaaagttttattatcacatggtattaaatttacattcatacttcaaactactaattcgacggaagttagaaatcaattttatatttcactgtttgatgaaagtttataatagtagatttgaatggtgtaaattggttaattcaattaatgttttcgattgggagaaaaactcatttaatattgaacataaattacctaaaaatcctaatttaaagattaattttagactaattcaaacacctaaatataaaagatttttatcaagttcaactgaactacatttactttttcaaggactaaataaatatcaaagaacaattgagagaatgacattaacaacatctggagtttctttaagacttgattataattctagtttatcattatacaaatttcttgaagttaatgattgtttaccaatgaaggaatttgaaagtgattatacatataattttactgatgtttatgttacatttaattcattaccacataaattaatgagaaatctgtttagttttaaaaattataaaggatcagtattcagatttggtaagattgataaattattatatgccgttgaattagtgattaacactgaaaataatagatgggcatatgatagaccaattattgttgttgcgagacatgattctattaaaaatgcatcagcctgctaaaaatttattaaagcaagttgaatggatttatgactggtaaagatatacattttgaacttttattagagtttttcattatttcaaggaattaaaatttctaatcattaagaatcaagtttaattgtacatgtattaatagtttttaatgtattataaaatttaaaacagttatatatataatatagtttaatggaggtagaataggtctctcttttaagttggaaatgaaattcaacaagaactctaaacgaatcaaagcataaataaatattatgaaacttaatttcgtttattttttttgaaagaatcacatattaatatattaattagtaccaaaaacttgagcaaattgtgaattaactgaacctgattgttgatattcactcataacattttcgagtaaacttaaggcacataataaaccagttgtaacaccaactgctaaaccttttgataaaccagttgattcagctaaaccgataacagcacctaaaatagttgcaccaattaacgaagaagaagaaattaatttatttaattcctttgcaacagttgcatctctatgaccgacaacaacgatatcttgttctttaaattgttttgcaagatctttaccagttgaacctgacattgcataccaataacgaccaaagatagctgaagtgaaagtagtaaatgcagtaaatgcaataattttaccaatataagataagaaattagagtaataagatgaacctgagatgaaatataataaacctgaagttaaataataagtattattagttaatgaatcaatttcccaatttgcgattaaatttgaaccaccaaagattttagttaaagcaaatgtaataatatttaaattgtaaataatagtgtaagagaataagattggtaaagcaccacaatagaataaacgaattggataagttgaaaccattgaacgaactttagttgatttaattgagatatccatacggaaattttgaatataagttaagataagtacgacaataattgttaaataaacttgagtaaaattaacttcatcagtacgattgaataatgaataaataccagttgttaaaggtttattgaataaatttttaaataattgaacaataacaccatttgattcaaatgatttaatattagtaataaaaccaaataatgaaccagtaaatttagttgcagctgatactgtaatgaaaaccattacaccaggaccaaaaccataacctttttctaataattcaactaataaagtaacaattgcagttgaagttgttaattgagcaataattaagatatttgaccaaagaattgaagttgttgaatttaaagaattttgataagagaagaaatcaattggtctaaaataacctgaaattgctaaaatagttgcataaattaaagcaattaaaacagctgaaattttttgtaaagattggaaagttgatctatcaggataaattattaaaattaattttaacaatttttaaacctgataatatttgccaaaagaaggcagaagttaaaacaggtaaaacaccaaattccaacaaagtacctgcttcggaggcaaatggaagacgtaaccaattaaatggatcagcaattttatttggatttacaccacttattggtaatgatgataataaataaagtgcagatataccaattgtataaactattttttcatcaaatacgactttttcataaggaagttcaatttctggaacgattccaacgaatggtttgaatatatcgagtgctctaaatttactcataatttgatgacaaatggagtgacttagtagaagatcagagaggaagagaagaggaaataagaaaaaggaaaagtaacaagaacagataaagtaaatcagttgaaaagtgtaaatagctatagaataccaatacgacactttcgataagagtggaaatggaaatggaaatggacgacattggaaaaaaaacgagaatttgagaaattgaaatttgaaatttgaaattctgtgaggaactttcggaattttcacactggggaattgggaatttagagggtggttcggaaatttagtaaatttttttttttttcattagttatagtaaagagtggtggtctttaaagaagagtagagtagagtagagtagagtagaatagcatagaatagaatactatgccagggaaggttgtaacagagaataatgaagagacatctaatggaatagaggagaatgttgatgaattaatagattataatgatgcaatttcttattggagtgaaatacctgcaacagttgatggagttttagggggatttggtgaatcaactagtgtaccaaaggcagatattgttggtagttcaacatttatgcgtaaattaaaatctagatggtcagttgaaaatggtaaaattaattatggtattgattttggtgctggaattggtagagttactcgtgattatttacataaaatttgtgataaagttgatttattagaaccagttgattcatttgttaaacaaatgagaattgaattaaaggatttaactaatgatggtaaaattggtgaaatttatgatataccaatgcaagattggagatcattctgaaccaaataaatactcaattatttggtgtcaatggtgttgtggtcatttacctgataatgcatttttagaatggttagatgaatgtaagagaggtttacaaaatgatggaattttaattattaaggaaaataatacaaatgatgataatgatttatttgatcctgatgatagttcaaagacaagatctgataaaaattttagaaaattatttatccaaggtgattggaaattaattgcaactgatatacagaaaggtgtaccaaaggaattattaccaattagaatgtatgcattaaaaccattaaataaggtataatcgtttataattaagtaagtaactgtaattaaattaatacaaatattatactaaaacacattaaaatcagataggggtgaaagacattttgatggaaagtttttatcttcataaagaatcagttgaactatgcattaaaattttaatcatcatattaaatgtgtttagtataagtctacaatgagaaatgcagtatatccactaatatacggtacacttcccttgttcaaaagaagaagtgcagtacctggaaaacttaaaaatagtgggaataacttctctttttatactacgcactgggaaaaaaaattaatttttcatctcttttcagggtttctatatactgatttatattatatctactatttatcatcaagatcattctcttctgtgtaatatatacacactaatgcacctaatcctgtaactattaagaatacgaaaactccatgacatgcataatcataggaatttacaactgcatctttaattactattggtatatcatccttaaatgcatatgcaggattttctaatgcctttgatttagcatttttcaacatttcaatagtccatccatttggtaaaatattctttaattcattaaatctatcattaagttttgatttaagacaaaattgtaaaattgcattagctaatgaaactcccattgttgaacctgttgatctaaaaccatattgaattgatgtaactaatgattgttcattttgtgaaactgaactaatcattgcaactaaaatagttgttgtatcaactgataatccatatctgaatggtaatgaaataattgaatcaataaatccattattttcctttgttgcaaaatacattattatactaccacctaaaatacaccaacctgaaataatatgcattgttctatatttactagttttcttaatcatccaacctgaaaaaactgatgtaaatgatgcaactaatgaacttggaattaatctataaccacaatctaatggtgaaatatttttaacacttgtccaataaaatggtaaataaaataaacttgcaaacatacccattgatgcaaaccaacaatttaatgaacttgcaaaaattgttttattatgcatcattttaacaggtataattggttctttaacctttaattcacaaaaatagaatgttataaatccaataattgtataaaagaataatccaatccataatggtgaattaattggtaattcactactatttgtaccacttataatcattaatgataataatgatgtaactaaaaggaaagcaccattccaatctaatgatttaaatttttcaaaatgagttttatcatcagtaatttcattattatttgttggtaattcaaagaaaagataaattgcaataccagaaattaaacaaacaggtaattgaattaagaaagcccaattccaaccaaaccatgaatcaataaaacctgcaagtacaccaccacttgcagcacctgcatgaaagaaaatatttgtataaccttgataaagacctctctcccttgtttcaactaaatctgaaattgtaattgttgataatgcgaaaaatcctccacctccaatacctgtaattaatctaccaataattaaataagataatgaattaccaataccacataataaacaaccaaagaagaaacaaattgtacaaattaatataattggtttcctaccgaaaacatctgaaattttaccaaataatggttgaaaagctgcacatgataataaataagatgaagcaacccaagaaatatgttcctgagaatctaaatctgaagccattttacctaaaagtgtggcaaccattgtggagtcaattgaaccaaggaaaacatttgcaaataaacatgataaaatgatcaagaaacgagtatgtgaaatagatttagtggtaacgggtaccaatggagtagattccgatacaactgtcattaccaaaagaaaggaatgatattaaaaaaaacagtagtaaaatcaaaggaaatactccttgtatttaagtaaatctcccaatgaaaactttcttatcttataaccgacttttagactgtgcaaagtcggctttcagaattttaattaagcttatactgtcggttatgtatttccgagggggttttccactcttttatgctgtgtatgtattgtaattgtatagtatagcagttagtgaagtaggtatattatgtctattggatttaaccaggtactattgttataatttataatccctactatgtactactgtaatatacactgtacagtataatctcctatagtaataatcaatcatagtaaaagaaaattaattctggcattattacgtaagaatatgaaatttcaaataatttatcaataagaacacgcaattgacttattaaggatttacctttagtgttattgtgtgaacattctttcttgacaattatccacaactacagggcaatatgtcattaccattccgtagaaatcatcgtgctgtctctcacactctagtggtgaagaattctcctgataatgaaattgcaaagactaattgtgttgctgtttctcaacaagatttccccgatggttcatatgttataattgatggtaaatttgttttcaccgttaaaaatactcctaaaataatgccaggttcaattggtttaagtggtaatcaaagattttgggggtcttggtcaacagatcaatcagtttctgtttcatcttatgatttatttgctgaaaataataataaaggtggttatttaggtacaattaatgtagaaattaatttttggagtaaaaatagaacaaataatattcaatatgattctgatgaattaatgaaagcttttattcataaatttgaatctcaaattttacaaccaacccaaattttattatttgaatttaagggtaattattttgaaattattgttaaatcaacaattgttgtagatttaggtcaagttgctgtcaatgatgtacctgcatcaactaatataatgaataaaggtattgttgttcaaacttcaattgttaatttctttaaaggttcagatggtttagttaatctaaaaccatcaagtacaagaccaaattctgatgcaattattagacctgattttaaatttgaagatttaggtatcggtggtttagataaggaatttacagcctatttttcagaagagcttttgcttcaagaatttttccacctggagttattgaaaaaatgggtatgacacatgttaaaggtatgttattatatggtcctccaggtactggtaaaaccttaattgcaagacaaatcggtaaaatgttaaatgcaaaggaaccaaaaattgttaatggtcctgaaattttatctaaatatgttggttcatctgaagaaaatattcgtaatttatttaaagatgcagaagctgaatataaaaagaaaggtgatgcatcatcattacatattattatctttgatgaattagattctgttttcaaacaaagaggttcaagaggtgatggtacaggtgttgctgataatgttgttaatcaattattagctaaaatggatggtgttgatcaattaaataatatcttagttattggtatgactaatagaaaagatttaattgatagtgcattactgagaccctggtagatttgaagttcaagttgaaattcatttacctgatgaagaaggtagattacaaattttaaaaattaaaacaaataaaatggttgaaaataatgttcttggtaaagatgttaatttaccaaaattagctgaattaactaaaaatttctcaggtgcagaaattgaaggtttaattaaatctgctggttcatttgctttaaataaacatattaaagttggtactttaggtcaattaaatggtgattttagtaatattatagttgatatgcaatgtttcttaaatgctttagatgaagttaaacctgcatttggtgttcatgaagaagatttacatgattgtgttaaaggtggtataataaattattcaccaaaaattcatcaagttattaaaagagttgaacgtgatattgaacaattaagacattctgaaaattttaatttttcatcattattattatatggtccttcaggttcaggtaaaactgctttagcttgtcaattagcattagattcaaaatttccatttattagattattaagtgcaaaggatatggttggtatgtcagaaactgctaaagttcaacatattgataatgctttccgtgatgcttataaatctccattaaatttattagttgttgatgatattgaagcattaattgattatgttccaattggtccaagattttcatcagttgttttacgtgctttaatgactagattaacttcaaactgctcctgatggtagaagattaatagttattggtacttcatcaaattattcattaatgaaatctttagatatgcttaattgttttaatgatgaagtttgtgttaataatgttacatcaattgatgaattatgtgcagttgttgataaaggtggatttttccgtggtattgaaaaggataatgaagatgaaattagaagaggtgatgaagatattgttaaacgtatacatactaatctgttaagtattttcccacaaggtaaaattaatatacccattaaaaaaatattatttattggtgatacaagtaaatttgctaagagatcctgaagatgaatttgttcaattaattgttgaaaatagtaagccttaaatagtttagacaagtatcataacttacgaacattataatctttttttataaattagttttaaagttttaaagaaatatataattacgaaataaagaaaaaaaacaatgaaataaaaataaaaacatagtttcgaagaatataaaagtgtagtaaatagaatgtgaaaagtatttgttttttaacctttatgtaaaagatacattagattaaattaaaaatagtaaaaaaaaaactttaagtagttaagcatggtctatgaagattttaagtacaggataatcattattcatactattgctataattttttcatgaaaaagcatttaatatgattcgtttatattttgtttgatacattgatattgtgtttaatttgttgtttaatagtaaaaccataattaagattcattaattggttcgtcattagatttttcaactggttgttcagcatcagcttcaacagcttcttcctttgccttcttctgcttctgctgcttcttcctttgattcttcttcatcttctccatcttcaccttcttcttcttcatcttcttcttgttcaggttgtgaatcatccttttcttcatcagattgattcatcaataaattgaaattattactttgttgtcttgtttcaggttgttcttcttcagtattttgaacattagcagaagaatttgatcttgaaacagctccgaaacctcttgaacttcttgatcttgatgatgaaactgttgtaaaatcatcttgtacaattttacccttacgtaaagcattaattgaattatcagtaccagtttttctaacaataccaactcttgaaatatcatttgaagaaatttgttcactaccccatcttgaagttatttgatgaacctctgaattgaacgacttttattactacgttcacgttcttgtgcatttaatttttgcttttcctgttgtgcttgttgattgaaatcttgatgaacttgtgaaagtttctttggaccttgcagtaattcatttgaacttgaccatttactctttcttaaatcaattaaatcataaaatttatatttaatacgtgatccaatctttggattttcaatatagattttaattaatgcaaaaacattatcacaaattgcaggattttctccatcaataccagaaccaactgtcaataagaatgtatataaagtttctaaagtatcttcttgaggtaaatattcattaaatggaacaggattttcagattgatcagttgtaagcattttgatacatctaataataattgattgtctaataatttttaatctatataattcaccaatgaatctaactaaacctaaacctcttctcttttgagctgctaatgcataatattcatcagacattaattcaggttcaattggtgaaccatcttcattaacaggtaaatcaactgaccaacctttagaatattctgcttgacatcttgtaacaagtaaattataagttaaacctgaacctttaatttttttaccatcatcagttgttgtttcaatatttggatcagtttcaacaagtaatttttgacaaaattgtgcatacattgaagaccaatgaggttcatcggttgcctttgcaaatgttgccttaacaacagttttcaatgatgctaaatcatcttcccataatgattgatttgctaatttaataagttcaccaccaattgtatcgaatttttctaatgataatttatttaataatgatctaaccttcttctctaattcttcaccttctataataactgtaacaccatcaggagcatatttaactggtttttcaacttttgcttgaatttttggaacccatctatttgcagctttttcaagtggttttgcatcctctaatgaaatctttggtttatcatctgctttttcagatttttcaccaggtctaccattacgtgatcttcttgaattatctttatcaccacctcttctactaccttgacgtccactatcacgtcctttctttttagatcccattcttgaatttctaccatcgaattcagatccatttcttaaagctgaacctctcattggaccatttgatcttgctcgactatctctatttttgaaagactttttcacgagattctttatcagggatatatatttttgagacatgttcagctttccatttatcatctaatttaagacttatattttgaaattgatataagaacattggatcatatttaataattttagcatctgctgaagttgaaggaccagtgaatttttctggatattcaaattcttgtggtttagtgatactttttgcatttgcaattctatccataaattcagaaattgaaatacgattatcttcctcttcttcttcttctggttcttcagttgtttcgtctgctttagtttcttctgcattttcagtagtctcagtagtttcagaagttttagattcttccttttcggtagtttcaacttcttctgtagtttccttagctggttcagatgtttcaactggtttagtttcagtagctggagtagattcaactggtttagtttcagtaactggagtagcttcaactggagtttcgacctttgcttcgaccttttcttcgacctttggttcttcgacagtttcctttggtacttctgcaacaggttctgcaacaggttctggttttgattcagtcttttcttcactagttggagcagtagcagcaggagtagcagtattattattttgagcggcttcagctgcagcctttgcagcagcagcagcttccttcttctttcttaattgagcttggaattgttcttggaaagaaagtttactacttgaagtttttgcaggtggagcagttacaacgggtgcagaagatgatggtgtagatgtggtagtagtagtagtggatgatgatgaagtagcaggtttaacaggtaatgttttatcgctattaatagtattagtagaattatcattagtttatagtggaatcatttgatttagcagtaactgaagggatatttgggattgaagaaattgaagtattttttctatgatttggtaattgaacttctttaccatctttagttttaataactattggaacatgtttatgaggttgagatactaaaggtttatcagagattggtaaattttgttgaggaattggataaggcattgaataataaggtgaattaaccatcattggagcaccttgttgataaccataaggaattgaatttgaatttggaatttggatgattacgataattattattattgttattattattatttctatgataatttttattattggtattattattattattataattattattcatacgtccaccatagttattatttgaaatatattgacctttatgattattatgatttgggttatattgttgttgattatgaggaacaaaaggttgttgatttgaacttttcggaggatttggtaatgatgaaggtgtattagttgatggtgcagtagtagtacttgttgttgtagtagtacttgcagttgttgcactagtattagttgtagttagcaggagcagagatatctggctttgagacggactgttcggaagtcattgttatatcctttgagactaatatatggaagatgtggtctcagaagtgtacaggacgttacttaaagtagaaaagataaatataagatcaaaaagtggttctactaatagtaaaataatttaataatttgcaatgcaccaccaaaatgaacgaagtgaggtgaaaaaagtgaaaaaaaattgaaaaaattgccattacccttttaggaaggaggagagtcgcgtcttttttgtctgtctctctctttatttattttattactacatgcagtgggtggcaaatggttgatatatacttgttgaagaaaagacaatcacttctttttgaggtgatttagtttatttaatacacacaatggcatctgctgaacttgtacatcacagtgggattaaacctttcttttctcaaaagatccaagattatgaaattgaacttgcaactaaaactcaaaatttaagaagacttgaagctcaaagaaatactcttaatgcaaaggttagatcattaaaggaagaattgaaattattacaagaacctggttcatatgttggtgaagttattaaagttatgggtaaaaagaaagtattggttaaaattcatcctgaaggtaaatatattgttaatttatctaaagatattgatataaaggatataacaccatctttaagagtttgtttaaaatcagattcttatgatttacataaaatattaccaaataaagtagatccattagtttcattaatgatggtagagaaagtacctgattcaacttatgatatggttggtggtttagataaacaaattaaagaaattaaagaagttattgaattacctgttaaacatccagaattatttgaatctttaggtatagctcaaccaaagggtgttatattatatggacctccaggtactggtaaaactttattagcaagagctgttgctcatcatactgattgtaaatttataagagtttcaggttctgaattagttcaaaaatatattggtgaaggtagtagaatggtacgagaattatttgtaatggcacgtgaacatgcaccatcaattatatttatggatgaaattgattcaattggttcatcacgttctgaatcttcaggtggtggaggagattctgaagttcaaagaacaatgttagaattattaaatcaattagatggttttgaatcttctaaagatattaaaattataatggctacaaatagattagatattttagatcctgcacttttaagacctggtagaattgatcgtaaaattgaatttccacctccaactgttgatgcaagaactgatattttaaaaattcattcaagatcaatgaatttaacaagaggaattgatttaaagaaaattgctgaaaaaatgaatggttgttcaggtgcagaaattaaaggtgtctgtactgaagctggtatgtatgctcttaggagagagaagaatacatgtaactcaggaagattttgaattagcagttgcaaaggttatgaataaaaatgaagaaggtgcagtttcagttgctaaattattcaaatgattgtatagtatattatccacatgtatatcttatatcttatataacaaattacagtaataaactaataaacaaagtgatagaaatagacaccgcgattaacttaattaaacatgctttagaatggattatcacagctttagaggaatacacatcagtaacttctcttggtattatcatagaatacacacaatacattacatcatatacaatgtcattctttttcaaatctcctctagatatagaaatcaattttgatggtgaagattctcgtgaaataattgaagttaattcaacaaaaggtcgtaaagaacgtttaccagtttataaagatggtgaaactgttaaaggtacattaattgttagaacaagggataataaaaaagttgaacataatggggtacgtgttcaattattaggcacaattgagactcatcatgaaggtaatataaataatgatgatttcctaagttttgcacaagaattagctgcacctagtactttacagaaaagtattaattatccattcgaatttagaaatgttgaaaaaatgtatgaaagttatagaggtatgaatgttagattaagatattatttaaaggtaacagtttcaatgaaaagttcagatataataaaagagagagagatttgggtttatcaatattctaatttaaataatttattagctgaatcagattctaaaactactcaaataccagtagataaaaatcaatcaaatgataaagataataaaggtaataataatgataataaggtaataataatgataataataaaagtcaatcaccaccttcatctgcaatttcaactgttaaaatggatgtaggtattgaaaattgtttacatatagaatttgaatattcaaagaataaatatcctttaaaaggtgtaatagttggaagaatttactttttattagtaaggcttaagataaagcatatggaattaagtttaattcgtagagaaactgttggtagtggtacaaatcaatcaagtgaaagtaaaactgttgttagatttgaaattatggatggtgcacctgttaagggtgaaactataccaattagattattcttaggtggatttgatttagttccaacttatagagatgttaataaaaaatttagtacacgtacattcttaagtttggttcttattgatgaagatgctagaagatattttaagcaaagtgaaattatcttatatagagaagaagaaaaataattgagctcacatttactgattactttcttcatatactttttatacctgtatcaattatataactacacaaatatgtatactaaatggaacgttaattctcctcaacgtgatacacgtttattatctttatctgttttagaaaagattgaaaaatcagagaaattgaaattatctccagaggctcagcaaaagttgattaaattgattaaaataaatacaaagaggttaacagcttaagataccaaatccatttcatatcacagaggacattcatgaaaatcagatctattacaattcagttacagttgaattggacaaatacaatgaaagaatattaaataatgggaaaaaattagaaacttggttatgcttttcgaaattcagtgttactaaggcaaagcaacaaaaggcaaaggtctaatgcactacgtgaaccaatatcaatgtctaaagatgttaaatcattaatggaaaaaagtttaaaaaaggaagattttattcttgatgatattgaaccaatacttccagaaaataaggatcaacgtttgttagatatagtgtactctccggagatagtacaaagtaaaagatactctgataaagaacaatggatatctaaacaacaacaaactatgaaaaatgttattgatgagcaaattgaaatggtaaatttagatgattgtttatttgagagagaacaagttgatacaaattcctaagaatttcttcattttcgatttcaaggaaacggagaagctaattaccattgaacataaatccagagaactattaaaaccgtcattcaaacgtaagtggaaagtgaaaatgccaattagaaaagtcaatcccaatgatattgaactactaatagatgaaagcataactgaatttcaggtaagattcaaagtaaatataagaccaattaattatcaacataataaatcaaaacgacttcagtttgataaatggaatttttcatcttataaaacacatatgatggattggaaaccttttaaaaatataaaacttcaacaaactcttgatgaatcaattagttcaaataatattaaaatttcaacaatgattagtaatagttctgaaaaatacattaaatattcaggaaatttccaattctaataatattccatccagataaatctttagaatatgaattgttacctttaattgaaaacacatccaattgtgattcatcaattgatattgaagtgaagcttccagagaaaaattgcaatccatttctcccgtttcagagtatgaacctgtttatgaacctgaaaataccaaaatcatcaccatgtaaggaaacaaaaaactcgttacttataaatggcacaactaattcagttttcgatcaatcttcaaaaatccctcaaaccaaagaaagatcaacaattgtccacgcctgttattaaaactagaagcatacccaacacgggtacatcaagtaaatcatcaagaccattaagtggtttagattctattataatgtcaaaaagaaaaaagaagaacaatgataatgttgcattagatttccaaaataattatccatatttgaacattctcaaccaaactacaactatgcaagtaaatggaaacgccaaagccggagatgattatacctgaaaaggaaaacattccaatttctaaaattgaatctaataagcataacaatattctagagactagtgaaaatgagataacgattccacaaaatgataatctattcaatatcgctgatgatgcattcgtagttattgcattaaatgtaggatttgcagaaaaattcggacaagcatttttacagtttaatagaatacttgattatcaacaaaatgttcaactatttgagtttcaaacaaataatgatcattcaacatcaattaaacttgaatatgatatgtatatgaattatagttgtggagccatatttgtaagaccaattaatatttatcaaagagatatcaatacaaaggaaatattattatttaaacaaatatcagaaattgcatatcaagttcaaagtttaatacttgtaattataattgatgaaaaagtcgatgatattaaagatttaaatattgtacaattcattgaagaatgtaaagaatatggaatccaaattatagttattgaaaataatgcaaaattgattgcaatgacaataattgaattagtttgtaaatatggtgaatttcaaaattgtgaaattgaatggaattcagagatggaatttttagaagcctgtggagtaattaatccatttctttcatcattgatacttgaaagatgtgagttatctgaatttatagaaatcaatgataatcagagagaacagattctagttgatatctgtacatctgaaatgattgacgaaataaacaaaggtgttgaaacattccttagagaagaatggaataatgatccataaaaaatttaattagagatctatccgtaatataatttttaagacttacttcttttctttccgatttgtaatccacttatttattttataattgtttaatatgtcaatacaaattcttgaaaaggttaaatatgatccattgaacgagaacatcacactacctaatcatacggataagatcattttacctgaagaaattttaaataatcttattaaacttcaaaaggaaaataatgttacatcattaccatatccattagttttcagattaagtactccaagtaattacacatatgttggagtaagagagtttcatagtattgataatgaaagtatatttttatcaaaagatgttaaggagagattaaggttaaataacgaagattcaattcaactttctgtggagttggcatataatgtgatagatattggtaaggcaagtattgaacttgaaccgattttaaattatagtatacgagattggaaagtatttcttgaatccacgttatctaacaactatacagctgtaacgacgggagatgttataacttttgaagttggtgaaatggaatataagcttaaagttaataatgtcaagacatttaatcaaatacgtacagtttgtgttattgatagagatattgatttaaatattcaaattccacaaaattctgaagttaaagaagataaaaagttgcaaattggtgaatatagggatttattcaatgataaaaatggaactattgatattcatgagagatgtaagttgaatattggagttggtatgaaatttgtttccataaataagtatcgattttacaatttcatacgatcaatttgttgatggcgaaagattcttgatgggtagcatgaacaaacctattaaagaatggattaatgaaactgatgatgatgttgcggtttatatttatgctataattggtccaattgattttcaaattgtaattgctagaagatattatggaggaaactattcctgaagattcaatgagatgtaattattgtaataacattattaagaaacaatcacagatacttcatgaaaatttttgtaagagaaataatgttttatgttcattaggttgtaatagagtatttttaaaggaaatcccaaaaactcattggcattgttgttcaacatatggtgacgatgaacaaagttataaattacatcaagaatattttcatgatttatctagtgaagtgattatatttgtgatgaatgtgaagaatataatgcaatcaataaatatgttatttgtgaacataagaataatgaatgttataaaagtttacatgaatgtcgatattgtcatttaattttacctaggggtaaaccaagtaatgaatcaatattttatggaattagtgaacatgaatggcaatgtggtagtaaaacaactgaatgttttaaatgtaataaaattattaaattaagagatttagagactcatttaaaattacatgaaattatgaaattacaacagtcaacaccattaaaatgtaaaaatgaattatgtgttgaaataatttctaataatgttgaaaattcattacaattatgtgatatttgctttggtagtttatattctaatatattagatcctggatggtaaaaaaattattacaaagaattgagagaaggtatattctgcaaattaaaaatggatgtggagatgaaaaatgtgagaatgaatattgtcaaagtagtaaaaaatgtttattaaaaggttcaaatatggttgatattgttaaatttgttagaaaataatattattcctgaagttattaatgaaaaaaagtttaaattttgtgtttcaaataaaatgaatcaacatagaagatatgttgaatattttattggaggtgaatatgaagaaggatgggtttgtaaaagtaataaagaatgtggtgataatattgaaaaaatgagtgattggttagataaatatgcagttaagacaaataaataaataaataaataataaataaataaataaataatgtagtttaaatagtttaaatataattataaaaatataatattctaattacctaaacattttaagatatcagaccaaacagtttttggagattgacttgcatcaacacctgcccaaatacctgattttttataataatcaacaattggttcagtttgttgatgataagtaactaatcttttcttcaaagcatcaacattatcatcagatctttgaattaatggttcaccagtaatatcatctttcatttcaacctttggaggattaaataatttatgataagatctaccagatgaaggatgaactaatctaccagtaattctattaactaataattcatcatcaatctttaattcaattgccttttgtaaaggtttttccattttaattaacattgaatctaatttttcagcttgtggtatagttcttgggaaaccatctaagataaaaccatttttacattcaggattatttgataattcagatttaatcataccaaccataatttcatcactaactaaaccaccttgatccataattttttttgcttctttacctaaatcagtacctttagaaacttgtgaacgtaacatatcaccagttgctaaatgacaagcacaatatttttcctttaaatttggtgcttgagtacctttacctgcacctggtggaccgattaaaaccatacgtaaagcaggtggtaatggagttgaaatacctgcctttgattcaagttcagtgacacgagattctaatttagttacaagatcttttacttggtccattgttagtttggaattgacttaattgtagaaggaataaattaaagaaaagcaaaagagagtatcatcaatattaaattaattgaatgaaaactcgacaactttgaaaacgggtgggtggatcacaaccactggggggaagtcactgaaattttccattgattgcgtaatcaatggtattatcgatgtttcgtttctattggtttataataacattaagttcatgacaataagtttaggaataaataaataaataaataaataagttagtttagatctatagaagctaagcaatataatataatagaataatgatgaataatagaataatagatttgatttgaaaaaattttaatcaagattaaaatttaacatcccagttatctaatttcattgtaccattttcttgtaaattaatatgcattttaaatgcatcctttaatgaatgtggttcatgtaatgattttgtctttgtacaatggaataaagctctttgataatattcatttaattgatctctataatcaggatgagcacaattattaataattaatggaactctttcctttggtgataaacctcttaaatctgctaaaccaaaatctgtaacgaaaacatctaaatcatgttcagtttgatcaatatgtgaagaaaatggaacaacacatgaaatacctgttggatcagttttagtctttctagcagctggtgtatgcataattgataatttagcattacgtaagaaatctgcagaaccacctaaaccatttaacattcttgaaccattaacattagttgaatttgcatgaccataaatatcaaattcaactggagtattcattgcaataacacctaatcttctaataatttctggtgaatttgagacaacttgacttctaagacaaatttttttagagaataaatcccaattatcgaaaaattttttaaaaccatcttgagataatctaattgaagttgaagttgcataatcaattttacctgattcaaaataaggtaagaaagaatcttgcataacttcagtccaaacggttaaatttttaaatgatgatttttctaaaccttcaataattgcatttgcaacattaccaatacctgattgaagaggatgtaaattttctggtaatctaccatatttaacttcatgttcgaaaaattcaattaaatgaccagcaattttttttgacatttcatcaggtggagttggatttggaacttgatcaggagttgtactttcaacaattgcaataacttttgaaggatcaactgggattgaagttaaaccatttttttgatcaactgtcatataaggataaggaggtctattaggtggattaattggcatatcaatatcatgtaaaccttcaaatgaaggagttgcagtattaacttcaattataattttatcagaaactgaaatcatttcaggtgatgcaccaactgcagggacctggtataattgaaccattttcagtaattgcagttgcttcaataattgtaaaatctaataaatcatttgatttttcctttgtataataaccataagttaaatcttgtgggaacattgataaatgtttatcgaaaaatttagttttattatcattaatatttttagaaattggtttaccaacttgatgaggagctcttcttttaatcatatttaattctgcccatcttgattcttctggacctgctgaagcaccaacgaaaaggttaaaacctaatttaccttgtaaattatttttttcaacatgatttgctaaagcagttggtataacttttggagcaccaacacctgtaaaacctgaccaacctaaatattgaccatctttgaaaagaggtatacaatcatcagctgatctaagttttttaagataaggagcatatctaactctttgctttaaaattgcggacatgatatgattatggtaatacaataagttattaattactaaatagagatactaaaccaattgtggggaagccaaataagagaaaataaaacaaacggtgcccccattcaagtatttataacgaataacaatataattcaaacttcgtgacccctctttacttcccagttgtccggtgagtgtattactctattgagatttaactgttttttcatttgttaccgtctcgttcccgagtattgtttgattaggtaatcatcattatgattacgttatcatttaccataatttaatttcaactaatttaccaatttcaattatcctatctaaatgaacaatatctctacttggtggtttaatttcaccatcatatccaactttaatctctaatttaataacattatcccaaattcttttctctcttaaaaattgtatcctattcattttattcgtatcaactaaatttttaaatctttcactattcataaatgaaataaatttaccattaaattcaattttaatttcattaattaaacttttactctcatcttcaacttcattccatttatttctaattccatattctggtataaaaatatcacttaaactaaatggatattcccaaacacaattaattaattttaatttctttaatttaattaatttaccatcaaatttcctttcttcataattttcaaaatcttctttaatatctggataaaaatattcatctttacttaatgtaaatccaattaattctaattcttcaatattatgaaatcttttcaattgtggtaattcaaataatgcattctcattaatatatccttccttattttcactaaaactaattaattttaatttccttatatttaaactattaaattcattaaaatcatccttatattttaaacatctactactatttaataattcaatctccatttcttcaactgaacaacattttttaaataatttaccaaatgaaacattccattctcctctatttgtaccattataatcatttaaatctctcttaattttaatctttcgtatattattaaatttattaaattctttataaaataaatcaaattgtgtccatttaatataaattgaatttgttattttatcaattaatttatcacgatgtattttattaatcattgataaatttattatatcttttatatctaacatatcaataattaattccattatctcccttgggaacttacttataatactttcatccctcaaaaaatccctagagctttctctcttcattctcttcactataggtccatcactcattgtttgtatacttctttcaacaataataaaaaaaaaacccatcaaatcatgaatcacatcaaaataaaaaccaaattatgaatcataacccctcgccaataagggcaaataaaatttttgaaaaattctcaatgtttatgacggctcatcttttcttgtattttattcaattaactacacctttcttcttttgatctttcttcttaagtattcaatcggtagtgcagtatgatatataaggaatatataataatgtagttttttttttcttcttttcagtctcacacttttctcttgataatgacaaatgcagtagttgaaattcgtgtatctgatgatgatatgctaaaattgaaaaatgctaataaaatttgctttatatcaaatactgacaataatgaaatactacaaataataccaaatttaataattgataaaaattatcttataaatcataaacaattaaataaattattatctttattccctgaaaatgatcataaacaattaattgatttaattttattaattgttaataatcaaccgaaaaatattataaattattcaatttcgagttatttatcaactttccaaaaattaaatatttcgaaatgtattagttatttaaattatattatctatgtttgtgatttaaattcaattaatgatgttaaagtaaaatacctatttaatttatgttttacactaatgtcatcattagaacaatttttcaatcaatcaaaacctaaaaaactttcactaccttcaatggcaatttatttggatatttgtataattacaaattcattaattttaccatttaattatacaactgttaaaaaacttgaattataaaatttcattatatttactagttaataataaactatattcattcccaattaaatcaaataatataatttatcaattgaataatataattgaattattgaaattcaataatttagatgtggttttctcttcttataaagaattaaatacttgttataataaacaattaataaattttatggaatttaaaaatattaattatcatacactatcaaattctcaatttggtttatctccattacatcacttatcaaattctaataatattgaaattttaatgtcaaagagaaaaaaaatgtcatttcatcaggttttcaatgaattatcaccttataataagaataattaaatttaattccttccttttatactgtcctatatactaaataattcatcattctttatatcatcatcattccatttatcttcaagttcctttaaaatttcaattgaattaaaatctccaaaattaattaaattattaaaataacttttaattaacttttgtctttcattatctttaataaatttaccaatattataaataccatttttaaataaaattaatgattttgatttaattttaccatcttcattttcaattgatttgagaaatcttaaattattgaaaatttcacttattatttgattaattaaataattatcatcttttaataataaaaattctttcaaaatttcaaaaattataattaatctattacattgataacttatatctaaccatgaaataaattctttttcattattattaaaatgaacttttttcaatcatttcctcaggtataccattattaatatcaaattgaaattcatcatttaaataacatgaattaattaaaattgaaaaattttttatatcttcattctctaatttatttaaaattgaaattatttcaaataatttaatttcattataaccatcaatttctctctttttaattaaatataataatttaattaataatttacttaaattatttgtaaatccataaattatattatacccaatatttatatcatcttgtttatcatttggtaaccaaataatttgtaattttttcaaaattttaaaatcttcataattccatgattcaattattttaatttcttcaattgtcattaaattatcaatatttaaattattaatcaaaattttgaaaaaccatgatctgaaaaaagccatagtctctaaaaaaatttcattttgattatcttgtagtttaatacttgataaaatcaaaattttaccaacacattcaaattgtaatttatatttattaaaatctttattaattaataataatgtaattaatataattggaattaaattattatcatctttactttccctttctttgaaaattttcaaacaagttgataaataattgtaaattcttctctcactttcaatatcatttgttaattgataattaattaatgcaccacatgataaaattgctaataaaacaaatttttcatttaatgcatgaaataatatgatatctttaataggatttgatgaatttttagcagatgatgttgcaaaggggaagattaatgaaataaaatcattataaaaatattctaaatatttttcatgttctttacctaatttaaaatcttcaatttttatatgttctgtaattgtagtgtgtttagtggtatcatatgtgctattttcattgttattaaattcataaattgttggaaattcgaatttatgatattcattaattttttcatttaataaatcaataaatgatgaaattaatttatcattagtattttcataattttctgaactgaaaagtaatgaaatatcatgaattgttggtccaattattggtgaatctggaataattacatttttactattattgttgttgtttttatttgaaattgtattagatttatttgttgattttttagtgttcttagtagtgttctttgtagtattagtagtagtattatcagtattatcagtattatcatttatatcatcctttgaaatatttgattcatttttaacattactttttgatttagctaatttcttaactctttccttacgtcgtttaaattcataaggtttacgctttggttgtaaataaatacattctttctctaatctttgacaattccaacaaattggtttaatttcatcgcactattagtaaaaaaaaaattttgaaattttgttagtatctttgttttataatgtttataatgtttataatgtttataatgtttattattataacatacctttattttcctctttttacattcaaaacaacccgttttagaatatttaccctttcttttagtctttggaggattagaagtgatagttatattattttgtggggtgatttgagatgattgactttgaatttgattatgtatttgaatctgactactttgattatgactattaggagatgaaggtaaattatcatcattaatattattattaatagtattattaatagaattattattatgatttgaagatggattaattacattcattgcagtattaattgcagtattaatagttgattgatcaatttgatcatcatccattgcgatattaatttcatttaattcaatatccattgtatttatttgaggatcaatctctgtatccaatgtctctgtcattgtactgtgtgtctatataatataaatacttcactatactttcaagaagaaacaagtgtacaataaacaaacaaaatcagcaactcagcatttcccgcgcaatatctcaaaatttactcttacttaacttctaacaattccactgctttaacagctgctccccaactcatttcaataccactacctccaaatccatatacatgaatgattgtagtactcctattaataacttctctctcgattctaacacctgtctttctagctggtcgaaatccaacattaatacgtaaaatatctaattctcccttatcattaaataattcaggaaatctactaatagcattattaataagtgatttagtttcattttcaattggtttatcatttgtcaagttttcattctttgtaccacctaatataataccaccatctaatggacgtggaattacaaaactccattctccattacttaattgataagtaattgatcttgaattacataattcataattttttaatggtggtctaattaataatgtttgacctctaattgaataacattttaaatcatatgatccatcatataataatccattacctgtacaattgaatattgtagaatttggatatatcatactaacttcacgtaatgaataaatttcacgttgaattatattaattctttgacgcattttcaatgattgtaacataaattccatataaacatgtggattaacacaaaatgaattatatgatgcaccaaatttaacattatttggtaattcatatttaggaattatttggaaatcttccacaatttcagtatatccttcagataatgattcatataatttattatcatattcaatataatcaatacatttcataaatttaattgaactctcaggatgtaatttagataatttcttaaattgtttatatgtttcatgagttaatttactatctcttaattcgtattcattctttgatgggaatggacggaaatgtgctcctgcctttgatgatgtataaaaaggatttaataatcctgattccggtaaatcttttgaaataatagtaatttcagcatttggttgtaattctgcaattctgtatgcagttgaaataccgataattccacctccaacaataacaatcattttacttacttatatgaagatatattaatcagtgtataatacctgtaggaataacaccttaatttatacttcccatcaactctgtgggatgattatatactttataaaatatagtcgataacctttgatatattactgaggcattaaaattggaaatggtgatatcacgataagcgctggttaacttgaaattgaagcgctaattgatgttttagtattacatgcacacatgcatgtattattatctgttatactagacaaccatgttacatccacgtaatagagtattacaggtagattcaggactattggatgatcaagttgatgatatattattgaataaattaaatgaaattttcaatgataattcattacctagaaatttccaaagatttacaacaaaatttaatgaagaaatcaaattaagtttaaaattgattttatataaattattcataattgatagatcaacaacttatggattacaattacaaaatttaaaattagtttcaaataattcattaaacaaattaactaaaattgccaaacttttattattatctaaaatcatatcttcatacttggataaaaaattaaatcaattagtttatgatgatgatgaaatggatcagttaagattaataatcccaaattatattccctaataaaacaatataatgaaaaaatttcacctatattggataaattaaataaattaacttcattatttaatacaataattttcttaatatttggtgattatatttcaatctttaatagattatttaacattaagtatgaaaaggcaaatgaattaactgtatcatttgcatcaaatcctcaatcaattagttatgaatttcaagatcgacagttaatttggaatacaattactgaagttttaagtaatatttcattaccaaatatttcaaatttaagaaaatacattacgaaaaatgatggaaataataatgataattcattaaacaataactataaacatttacctgaaagatattgtgctatatgttttacagaggatgaagttttggagaatagtttaattacaaatgcatataaattagataattgtggacatatttattgttatctatgtttaatgagagaatcaaaaccatggaattgtttaagatgtggggttgagagtaataaaattagtgtttataattaattaggtagtttttttatagtataagtcaaattattgaaattaatattagaagtaatgatacacaaacaggtataagattatataaaagaaacaaaatgtacaaagagggtaatagaaattaaaaccatgtaaagattataatttttttgtatttttaaaatgaaatatcgaaatcgatattattaacgaatgacttaaagaattgaaaagttgtaattaattaatttgaaattaatttaaaataaaaatgatgaaaattatcaaatttataagagcattgctaagaatacagttgctaaaccgaataatgaacctgcaacattagtagcagctgcaccttgatattcagattcaacaggtgggttaacagaaactgaagttgatggaacaacggtagttggaagaactggagttgcagttggtgcagtagttgttggaacaacagtagttggtttaactggagtaacagttggtgcaatagttgttggaataacagtagttggtttaacaacatcatagtaagaacattcagttgtagtataagtgacactcttagtaacagtagtaccttcagtagtttcacaagtggtagttgtaacagtcttagttttagaaacggttttatcagcatcaacatcagttaatggacagtaagtagtgtaaacggtttcattttcagtaacaacggtgacaccagtagtaacagttgattcatgacatttgttatcagaacaagaagtaatagtaacaacaggtagtttcagtagcagtgtgagttgcagttgggttaactggggttaaagtttcacatttatcatctgaacaagaagtaatagtttcagttgaagttgaagttgaagttgcagtattagtagttgtaacagaaccagaaccagtagcagttgatgaacctgaagttgcccaagatggaactgatgaagttgcagtaacggtaatagtgaaatcttgatcagctctcttttcaataatttgtggtaaaccttctaatgagataacaaagataccaattaaggcatcagattcagaagaaattggacctgagattgcaacttcagcatatttatcatcagttgagaaatcaacatcagctgagatatcaattgattcagtagttgaatctgaggtaacttcgaaaggagtaccagatggagaataaacacctgataaagaatctggtgcaaaagagaaaccattacctgaaccagcagcaattgagaaagatgagaaaccagaatttggtaagataatatcgaaataaacttcaccatcatagaagaaacctgaacctgatggaacaaaggaagtatttgaataagtagcagcagaagcaacagatgcaagagcgagtgatttaacgattgatgaaagcattgttaattttttttcttatttaatgaaacaaggtgaaaaagagagtagaaaaaaaaaaagaagaggaagggggaggagtagaagagataatgacagtgaattgaaaagaaaggagaaacaggagagtttaaatagaaatgggtggcagggttgtagaaaaatgaatcacaacaacaacacgatagcaaaaattgcaacaattgttaaaaataccaaaatagaggaaatataaacaatagaaattactaaaatagcatcaccttaccaatatatagtaaacaatagagaacaatagagaacaatagagaacaattaaaaaatagcaaccataattaattagcgtgttagtgctctagagtggctgtatattttcaaagcttaaatttatagtttaatagcttaaaaatttttatttatagtgctagtttattacccttttaggttagtctcaataaattaagcgcgtttcatgtatattttcttttttaattacttacgtaagtattcatgcaggttcttatcaatttatcatcaatttataaaatctcatttcctagttactatcttaccaatccccatatcttgtaaatctagttggtaaactcatcgcatcccctctttgatttctgttattattattattccttaaattatctctctttcgtccaaatttttccttccatgtacttgcagctgatcctaatggtctaccagtattattttcaacatgttttaaatataatgtaacaattaataaactactaataacaattaaaaatataactccaattatacctccaaaccatccataattactaccatcttgtcccggtattttaacattcataccaaataatcctgtaattaaattcattggaactaatattgtacctaaaactgtaacttttgataacatatctgttacttgtaaattagaataaaatgattcaacttgtaattgtgccaaataattagaatgtgatctactgaatattttctcatatgataataatgattgaaacatcgtaataatatgatcttgaatatctcctaaatataatgcaatatcagcacttggtttagcttgtcgtttcttattactattattattaccataattattacccatattattcatatgtcgactatttgatctactatcatattcttcaccttcattattttcttcgcttataatatccatacctgaattactattattagtagtattgaaatgatttccttcacctttattattattattattaaaattttgatattgttgttgattttgtatctgctgattatttttattttgaatttctctctcctttgcttcttcattacatcttttagcaaacattttaatgacatctgccttaccttgtagtaatctcattaatgtcataactttacgtctactttcaccaatttttaataacatactaccaaaatcattctcatctgataaaaatactgaatcttcaattgaatctgcttcatattctaatgattgaattaatggtgcaaatccatctgtaatatcatcaatcattgcataacataaccaatctgctgtaacatcaacataatctcttaattgtctaactcttcttctaacatttgcaggattaacaattggtgaaaaatgaaatgttaaaatacctgattcaaatacaactatataaacattaattggttcaagaaaatcttcactttcactatcagtttcaaatgtatgaaatgaaacaaaataataacttttaaataattcaaccttttcacgtgtttcttgcattctaatatcttcagctgttaatggatgaatactaaatgctttagctaacatcttcatttcattatctgttggacatgaacaatctagccaccagatagaatcttctggttcgaataaacttttaaaggcttccccttcagaaactaatgatggaatatctgctgaatgaatagtttcttccatttcacttgaaaaaaagctaaatcttgttggtaactcactcttccattcacttctctcctcttcttcttgaatatttccctcaggattaaatgtaacatcatatctattattattagtattgttgaaattgttattattactattaaaattgttatcattgaaattagtattggtattatttgtattattattattactaaaattattgaaactattattatcaccacctcttttttcaatctcactctccgatgatgaagtaactttctcatattctccccttggtgtatattttaatgctgcactactcataactcttgcagaacttgtagtaattgcatgattattatccattcttaattctctttcacgtcttgcaattctttcatcctcttcacgttgttcaacaataaattcttcaatttcatcaaaatcaatacctctaatacgtatatgttcaggtaccattgggaaacaaacatcttcctctgtttcttgtgattctcttgatgcatgagaatctaaatcactgtcatcattacttaatctccgtcttgatctattacttctaccagaaactgttgacatcttagatgcaactcttgataatgtatcaggataaagtataccacttttctttgaatgtaaactattaaaactatgaattgaattattatcatcgttaccacttttcaaaatacctccaactgattcctctcttggtctaattaatgatttaacttgtttactaaatgatttagatctacgtttagtacctggtgtataatcagttaatggtgcaggagtattattaacaccagcaaaattaataccttgctgttcatattcattattattattattcctgtataaatcattaaatttaacagcatattcatcataatcttcatctccaccattacctaccatacgactaattaaatctctacttgcaatattagaattaatgttaacaattgttgaaggtttttcactcataatcattggttttataccattaattgaaccatgggaatttgtacgttttctccattttttaacttcatttgtattagatggtttacttattgattcatgttgatctctatgatcatcaagttgagaatctccacttattgatgaatgaacagaattttcatcatctgttactgggttagccttatgtgcggctgttcctggtgaaactgggctacttggatctatattggacatctttattgcttattgaatgaaatggttcttcttagttcatatagttgcaatattaattgtttaaatacaatatgtaatcattaaaagaatgtattacagcaatatactaatgatatcagttgttgtaatcgatggcctaactttaataaaacggaacaattatttttctgttaattcacccatgcggaacacaaaaaaaattttcatgacaatttgacatgtgggaagtggcttgttattatgtcgattgttattatttgtttcttaaatttttcagtttattattttgtatttagtgtatatagttaattatagagatgtaagaagatggatattatagctagataatatcctttgtagaaatttaataaagaccttcagtgttatgtacaatacattgaggttcatcacctgaacgtttaacaagtttaccaattgtatgaacagtttcaccagcttcttgaagttgtttcgttacaattgctgcattagattctttaacaattacaaccataccaataccaagattaagtgtctttaaaatatctttgattggaacaccaccagttttacctaaccatttgaaaatctctggaacttcccaattattcatatcaattgatgcagttaaatgtgatggtaaagttcttggaatattttcaactaaaccaccgcctgtaatatgtgataaacctaaaattaatttagatttaattgatggtaataattgtttaacgtaaattctagttggaattaaaacttcttcaccaattgttttacttggattccatggtgcattatcagtatattcaaaatttgttgcatcaataatttttctaactaatgaaaaaccatttgaatgaacaccgtctgatgcaagacctaataaaatatcaccttctgacatttcattaagtaatggtaacatttcactctttaaaacagcaccaactgctgtaccattagtatcataatgacctggtgcatacatacctggcatttcacttgtttcaccaccaactaatgcacatccagctaatttacaaccatttgcaacaccttcaacaaatttttctgcaatattaatatctaaatgaccaattgcaaaataatctaaaaacattaaaggttctgcaccttgaacaattaaatcattaacattcattgcaactaaatctataccaacagtattatgaatattcatgatttgtgcaattcttaacttagtaccaacaccatcagttgctgcaactaatattgtttcatcaatatcatcaaatcctgctttctttaaatcaaataaaccaccaaatccaccaatttcagaatctgcacctggtcttgcagttgatttaaccatttttttaatattttcaactaatttattacctgcatcaacactaacacctgcatcttcataagtaatacttatttttttatctgatgattccttaaatgctctatatgcaatatcttttctattatatttaccattaaatgaaacacaatcaacacctaaataagcatttttgactgcatcttctaatttattagaaattgaagttgatgcaataactctacccccagatgtaacaactttaccatttgaatctaatttagtacctgcgtgaaaaatataagtattatttggtaaattagatgaattaattgtaatttcatcacctttagcataagattctggataaccacctgctgccatgacaacagttgttgaagattttaatgaatcaatttcaaaattaacagaatctaatctatgttcaactgtaccaataaataattctaataaatcacttttcaataatggtaaaacagtttgagtttcaggatcaccaaatctaacattatattctaaaacttttggttcaccatttggagaaaccataataccaacaaataaacaaccaaccattggataacctgcctttctcataccatcaactgaaggttttaaaatagttttttcaattttctttaataatgaattagttgctaatggagctggagcataagcacccataccaccagtatttaagccagtatcattatcaccaattcttttatgatcttgagcaggtgggaaataaacatatgaataaccatcactaacacataaaattgataattcatcaccttctaaatattcttcaataacaacttcgtcacctgcattaccaaaagctctatcaaccatgatttccttaattgcattctaatgcttcttcggtattttctggaattaaaacacctttaccagctgcaatacctgatgctttaataactaatcttgtagttgcattttgaacatattcttttgccttttcataattcagtaaaattttcataacttgcagttggaatattgtaatctttcataaaatcttttgaaaatgcctttgaaccttccatacgagcagctgattgtgatggaccgaaaactggaataccaactttactaaaagcatctgcaataccatcaactaatggttgttctggacctggaacaactaaatcaattttcttctcaactgcaaattcaacaagttttgggaaatctgatggtgatgatccaatattaacagtttcaacattttccataattgcagtacctccattacctggagcaacataaattttacctgctaaaggagattgagaaagtttccaaactaaagcgtgttcacgaccaccgttaccgataacaaggatattgtataatttagtcattgattgattgatgcaagaagcagtttgctgaactatcccctaacaaaagaaagaaagtgacaaatttcaaaagaataaataatgtgacagtccgaaataaattgagctacgaaaatatttttttctattataatatcaatatcaatatcaataaatttgctttttttgactctgttccctcactatcttgatttctatttctatttctatatttctatttctatttctacttctatttctacttctatttctattttcatcattaaactactattacacaattatacgtcacaatatatcacagtttcatggctgtagtatgaatggcactggcttgggaggatgaagtacttgatcccttggtgccgctccgcattctattacgtggattggatttaccccttgctttactccgtctactctgtgatgaaaccttatctaccttacctgctcttttcttagctgcacctgtacctgttccggaactgaaaaatggtgatgttgactctaaattcgatgtatttgaattactatttgtcaaatctaatgttccaaacaacttcattcttttcgtagcggagtttttgaatcattatttggaaatttacaaaatatttaccttgatctggtttgtaaatcatctaaactttcatagacaatcttattaataggtaattgaaatgacatacttttcaacatactatctgatcctaatgatgtctccttgcttagtgaaaatttagttgctaattgactccttatctttctcaattctaaataacattcatccaaatgtctcttcttcaaaggatcattaattgaaagtttattcacatttatacctttactattaacatttctattattaccattattattgtatccaaattcttctaaatttccattccataattctgaacttggtctaaatgatggttgtttgcctgctataggtataggttgatcttcaaaaccattagtgttagcaccattatctttcataatacaaaattctaatgagaattttatctttaccactcaacagtttatttgctttatctcctaaatataaataattagatgaaaatcctctacctgtactaattggcttttcccttaaataatcatctttaattaacgtgaaaaacaatctttcgaacttcaaccttgttgaaagttttcccaacaccgtggtattcaagtttgtcataattcttactctgtatcttggcatgtttgaaaacctttgataatatcttgacagattgccagtgttaccctattactttggaatttctttgaccaataaaacacatttcttagcaagttcggtcatatctttcagttcaactttagtattagcaaaattcaaacaagttgtcacaattcttattacattcacttctattgaatttttcattgaaatattgtaaaacaacttctcttctacaatcaattttattctcacaatattgtgtaacttgtttcaatttatctaaatgattttccttacttgctttatctaattctttagtctttacgaatcaaggtttgcagagttcttgaatctttcatactataaaacataaaacattttgatggtttaccatctctaccagctctaccagtttcttggtaataaccttctaaatttctaggaattgttaaatgaataacaaatctaacatcagctttatcaatacccataccaaatgcaattgttgcagctatgactttagtcttgcctgattgccaattttgttgaactctagatctttcatcaaatgtcatacctgcatgataaaattcacaattgattccaaaatgatttaatcttctacttgtttcttcacatgaaagtttggaatgacaataaataatacctgtttgattattaaatgaattattaatcaaatgaccaatatcttccataacagatttcttcttttcaaaaactctataaaataaatttgttctattgaaactttgtttgtaaaatttaggatccctcaatcctaaatgttcaataatatctgctctaactctttcattagcagttgctgttaatgccatcattggaatatctggataatcttctttaaaaaatctcaactctttataatctggacggaaatcatgaccccatgatgaaacacaatgagcttcatcgataacaattctagcaagtttcccatctctatataatttagaaattgctttcttacattgagcacttttactgatcatctccggtgatagatacataagatcaattaaaccattgaaaaacagattaaaatgatgttttttatcctctgctgacattttagaattcagcattgttgctcttatatctttttcaattaaatgtgaaacttgatcttccatcaacgaaattaatggtgaaataacgatagtgacacctgatgtaacacctgaattgattacagcgggaagttgataacataaagatttaccaccacctgttggcatcaaaacaaacacatcatcaccatttaatgttgagttaattgcatttaattgattttctctaaaattagtcaatttgaaagtttttgttaatactttataaatatcactagtccactcatacttaccgtggaactctttgaatgcttccttattaggatttgttaattcttcaatatcatctggtctttcagtttgtgtaaaagttttcttagtaatttttggtatagttgtttgtaaattatccagaatgatatcatcagcaccatcggcccaatcagaatcatcaacgtcattattgagttcttcatcaattccacgctcttgattaagttgtgtaaaataatcttctttattttcaatgatcatcaaatcatcgtcgtcatcatttatctcatcatcactaaaattatcattctctaaatcgggttgctcgttggttttattattgttattgttattaatcagttcatcattatttgggaaatgatcaaatgcatcactaaatatttcatcttgttcttttcttggttcataagtattttgaaacttatctgtcgtgtcaatgtcagataaatcatcatctagatccattgcgccattcgggtgtaaactttcttcaacatcttctatgtcttcaacgacactatgattcaaattaatgatatcagattgactaatctcttcgatttcgtcaatatcattttgatcaaagttccaatcggtattatcaaaattattcggagaattgtgattatttattggttcagctggtctgtttttttcaccattaacaaattcttcttcaacgtcttcaccatcatcattataatcatcatcttcaacataagatttatcaacggatacattttcatcatcactaataacaaaattacccatctctttacgaatttgagttcttgtctcaggttcattttcactttcacaattgaatgaatcttcaatatcatcttgagttgaccaaataggtggtggatcttttggttttaaaactctctttgggcgttctttggtggtattatcatcaaaattgtcgttgaaaacgtcatcaaactcatcattattgaggaagtttggtgcagtctcagaaacttgaattgaaggtgatgatagaacttgaacattgttattatgattatctgtagtaagtatatcatcaactttacgtatagttggaacattagcattttgaataattatatcagtatcatctgcatcttcaactaaatcatcatcatcatcaaaactatcattttcatgtctatgtatattattcactatattgttggtcaatattgtaccagatgttgtagttgctattgatgtggtgaaatcattaggtttcttagtattgtttatattctctagttccgttgaagcagcaggtggtgttattattggtgttggtaatgatatttcatttgttaccttagtattggtattgatttggggtatctcattaacagcatctatatcgatagaaggtaaggaatcttgtaaagcttttgattgtttctttaatttctctaacgctggataaaacgttattctttctcttctttttgagtcttcagataatgatgttgatgtttctatttgcaaacctttttggagaaaagaatttagctctaaaagatttttaatcaattcattttgtttcttgcataaatttttcaaatctgaaattggtgtatatgtttttgcttttaggcctgtattcagactactatttgtattcctatcaatattagaattgagtatagcagcagtatttatatttttctgtgttgatgtttgtggtatattattattactactgtatgcagaattatttaaatttcttttattattattggagtcatgttgtgctaatatagcatcaagatcttcttcatctgaaaaaacatcagtatcatcatcaacactagtcttagagaatggatcattgttaggtcgtttattgtttgtattaacattattagatgaatggttgtcttgttttcttttctgtggcaaaatattatttgtttgtatatttatattaacatcttgggttaaatcaatgatatcatcatcattcgaaacatttttatttctattttgcatcaattttgttattggtacctgcgtatgactaccattactactaaatgatatattttcattattattagtagtagtattggaatgattattgttgaaagtactaacattgttattaccatatttcagaggaagggttctttgagtaaaagatgaagtttgtgatctattgttgttgttgaatgtacttgctctttgaacatttgtatatgacggtatttgagttgttgaagtttggtttgaagtagtattacttatggtattattccttatattataattaggcaaagagttggaatttgattgtattgccgttgtagtataactccttgaattggcgttccttgatttatattgttcttgctgttgaggcgtcagatcaggtatatttagatttattttgggtatataagctttagtattagttgcccatttaagctgatctttcagattatagcttggggccattgctgttggtgttatagtggagaactagaagtgaaataaaatataaaatcaatgcaagaaggtgtagtttaacacattgtaaacattaaaattacgtgaatcccttacgtaaaggaaatatttcaggaaaaaaatatttttgccctttttaatttcaataaaaatgaaaaaagggggattcaaaggctcttacaaaataatactttactattaactataaaatgagcttaccaccacatgaagaaacaaacctttgtttaaccaagaggaagtaaggcgtcagaaaccagtaatagtgcaagggtaacgacaccaacgcccaaatggaagagccagataaatctgaaccacaacctgtaggactcaaacttaacaaaaataatgtaacaataacagtcaatgcgaaaacaaggactgatttcagctgttacactgaaaagaacagatactacacttgatctaagccaaaaggcaaagagatcttgccaaaagagataaatcaaaaagagtatagtagatccttaaaattcaaacatgggaaaaacagcgacatgccctccttttatactttttttccaaatgaaaatgaaaaaaaccagtattctggctagcccccactttaatactatttttttttcttttgacatatcgaacaatttcaattgtcatttgatattttttatcttaatcgatggtctgttatctcagtacttaatgttatatttaactttattatatggatacttaattgtgctttatttacttctttaacttataatatataactcattttaataccatgttctctctagggcgacgccatacactcaatctccttttcatactcattgcagctatattactgctgtttttagtagtaaatattttaccctcacagactaattattatgcaagtctagacccttccctacaacatcaaaaatttggtatagtttctgaggatggtacaattgaagctgatcaaatacagaaagtttcagaatctgaagattataaaagaattagcggagctaatagagttaaacaaaaatccgataacaaaaataacaataataataaaaataatgtaatacaaaatggtaatatggcacttttaaaagctcaaaaagttaaaggtgcaaaggctaataatgcaaaaattttaaaacaagccaagaatagaattcaatgataaaaataatatacccaaagttgataacaatctggttcaatttgataataataataatttaaaaattgataattatagaaataaaatgagagaagtcaacaaaacatttgttgaagtgattcaaatgttcaacattttatagatattggtgaaccaatgtctgaactgagtgaaatgacaggtagagtaaggaaattatttctacgtaaagttgccaataagaagaaagaacttggtttggagaataatcttctacaaaattccaatcttaataataacaataacaactaaatgtatcaccctctctctttcttcacacaattgatactacactaagcctgatagatatggctaaaaattatattcgtcataatcatatgaaaactgcattcttcttctatctttaaaaattactgtctaatattactttccatcactattaatgatatcatgaacttaatggctaaatgtaaattgatataatctatatattatctgtaaattagtactacaacctgttaatccgaagagtcgatgatacaccaatcgtgatggcataaaaattggtcgattacgcaataagttgatatcagagaaattacttgaaatgatctattaccaacgaagttcttcctcaactgtggcgtctttctatcagtaacccacgatccactgacaaatataaataatataaaactttaaacaattcttaattctttattcatattatggataagagaagatcagattcagctcaaaatctctcttcaatgagacaattaagtatggattattcgagtactgttatgaataatacttcaagaactagtattgatcaaagtaattcatcagaaatcaatccatttgaatcaaataatgaaatacccatgccaaagactgtaaatgataataacaatatggaatccaattgaacaagtacccacagagactaattctcttttagcaccattaagtattaaaaagccaaaatcttggaccaattggggatctctattacttgaaaataaaggttcagtagctcgtgatcatttagcaagtgaacgtactttcttagcttggcttagaacttcattaagtttggcttcagttggtgtcggtgttgctcaattattaaagcttggtagtcatgaaaatcatagttacatattgttaaaattaagtaaaagtttaggattatgttttattgttgttgcatctctgactttgattgttggtacttttagatattatgttattcaaagattacttactgttgatcaatttcctgtaagtaggctgggtgtaggattcattttagccgctgtatttatgctttgtcttgctatctttgttgtcgttatcactttgtaatcaatcctctatttaacatttctagctatatatatatatatatcttatcaatgaaaaaaatgctgtaattagttaaagttaataaaattattgtcttttcaattaataattgccctggatatatatcctatctatttattgacacttctaagcgtatattcaatgcaatagactaaaaacaggctttttttatacatttttgaagattaagacattgtagtggtaaatattttgtgcccgatggaaaattttcattttcaacgctatttttaacttttctttgaatttctgtttttttaagtataaaaacacaacaaagcttttgtaatattggtaaaagatatattataatgacacacatcattctttagcaaatacagattcatatcagattacgtaagcacaaagataaccaaataaatacccgctgctttcaaaacacaacaagtccgagatagtttagtggctagaatttccgcttgtcacgcgggagaccggggttcaattccccgtctcggagtttttttgaatttgatatactcttaacaaaataatttttttttctacagttagcataaatttatttaatgattttgcttctagaagctgttagcttagaatttttttctttaatatatagatcttcacttcttaataaaagcatactttatacaactaaaagaatggtgttatcagttgcagagagtagttatatttacgattcccttacgagttcaaactcttcaagaattgacgcaagaaaagccaatcaatatagacctttgaatgctaattgtggatttttaccaaactctaatggttcatcacgtatatataatgcagatggtattgaaataataaccagtgtgaaggcaaaagtagtaagaaccgaacgtattgcagatttaataaatgttgatattgatatacactggtgaaaaggataatacaacattatgtcaacaattaacaacattgatcaaagcttcaataatggatagcttccaatttgatttattgaaattaaccggtaaatattatttccaattgtttattgatgtctctatattatacttacctgaagattttagtgcttcaagttatacactttactcacttttatcattaatatcaatgaatgtctatatttcattaaagtctacaaaattaccatttttaatttcaagtaaggatgattttgatgttgaagaagaaccaacttttagtgatgattgggaattatctaagtttttaatacctcaagattcaaaaaatactttccaaccacctttaattttcgttgttggtactgctggtgaaaaagctataatagatccttcattagaggaagaagaaatattagaacatggtatttgtctaacatggtcaaattctaaagttaccacccctattcaatcattaactttatcaacaaataatactaaagcattgaaattatcattaataagtgaagcaatcaaattagtgaaaaatgttgcacccgatgttatctctgctcttgatacaatcgctagccaggagtcagatgatttcaataatggtttctaagatagtttatatgtacaagtatataatataaataaattttatataaaaaaacagtgttaaaattaacagtgttgagaagaataagcatgaacaataactgcagttgcagtttgaatattcatagatctaacaataccaacttgtttgataatgacacacatatccaattcagctaataaatcacctggaataccttctctttccttacctaataaaatcaacgatttctttgggaatttcaaatcactattcaattcaacagatttatcagtttgttctaaaccaattaatgtatatccttccttcttctttaatctcataaattctgcaatttcatttattttaacttcaattaatggcatccatctatctgcagtaactgcaacagttttaaattcttgatcatttttaactgatatatcatcaactgtcatccaacctgcacctaaaacatcacataacctacagataccacctaaattaggtggtttatcaaccaatgatgaaacaacaatcaaatcacttcttttaacttgagctgctgctctaacattatcatctaattccataacagtagaccaaactccacttttcgtttgtaataatgaagattcttcagcttctttatttaaatcgaggtaaaaactttcaattttaacatcagcatttctttcacccttaacccataaatcacgttcatccttgccaattggaattctcagcttgtttatttgtgatttagtaagatatgagtagtattctttttcgtaaattgcatcaatttctctatcagttgtctttaataaaacaccacctgtgatagcaaccaaattcatgtcttccttaatatcccacagtaaagcattacctgtacgatagttacttgctgaaggtgattcattcaacttggtatcttctgaaattttgctcaatgttctcataatcaatggatcaatatcaagattatctttaagaatttcttcataaattctacatgctaaacttgttgaaaagtgtctgttaagagcacgatttgatgatgatgtaggcaatatagtttccacaataaattcagttaagaatttggtctttttttcaacaggtaattgcattgaaattaacattgaaattttttccaatgtgacaacaactaatggttgttgtgtctttgcatttgtttgtaatgttttgaacacattatctttgaattcaggttgacgtagaatattgatacatagaatccactctatatatgtacgacataacggtgacgcttctttgaataatcttttcagtaaatatgtttctgaataatgtgttaagtgcttaatatcaataacttctgaagtgataacaaacaaggaaaaaaattgtaatcttttccattgttcttctctatctgtacgttttttaggttctaataagtggaatattgattcattttcaaaaatataactccagatttcattaacaaatacactggatctaaccgatgctgcaattgtatacaaagtgacatgataacttatttctgcatcaccgtaaactttttggtataatgagtcacctgtaatattaagaagctcatcatactcatcagcaatgagacaatcaagttgaaaaatattcaattcactttggaataagaacacacctttgacaatcgctttagatagccataaagttttttcaaaattttcatattgctcaacttgatattttgaaatagctctagtcaatactggcataataccttttctacctgctgactgtgtaattgcttgatcaacaattttaaaaagagaatcagcaaatctttcattgtcaatagaataaagaagtaacttgccatttaacaataattcaatatattgttgatgtaaatcacgttggctcaaaattaaacgatctttaactaaatcttcccaaataagttctaatatttcaacaatcttcatagcttccaactcaacgagtggttccttttcagtcatattgctcaacatagtttcaatcaattgtacattcatgagatgcgagttatattcagaaattgaaatcacatcattcgatagttctaaaatgttttttctgaatgtagtatcaaattgtgaaatcttaattaatgctttaacattagacaatatgtaagagattaattggtccttagctttataataagtaacatctgaacctctaggtattttacttaatgcgttagtgaataaactgacaagatcatccaaagtaacttcaacattttcattaaaaatacatttttcaaaacaaccactgaaaaatttatattgtgcaatatagtagttggcttcttccatgttatcaacattgattagtttttgctgaatatcttgaaacatgaaattaacatcaacactatcccaaaattcatgagaaaataatgtttgattattaaacaaattggaagaatctgaataaatagaaatttctaaatcatcaccatttaccatttgtgcggtcagttgttcaattttcagaataacggaggcgtctttccaaatagcatcaaaacttaacccacaatgtgacatctcaactaaaagtttataactatcttgatatgaaataattaaaggtatcacagatttcaaatctaccttcatagatgcgagatatgataatacaacaataaatccttcagtagagaaaggtaaattcaatagattaacaaactcatctttttgaaaataagttgtgaaataatcaataaaagattcttcattttcagcatagaatttccatccatttatttgaataaaataagcaagagcatcaatcaaagatttgagtccaactaattgcgcatcaacttgtaataaaatgtttaagtgaatagtatgtaatgtagttacacaaatatcaccctctgcagtagtttcaaataatgataatagagatttcaaagcttcttcatttaatactaaacccgtatgtaatcttaaaccatcaagaacaccccagatgatataaatacgtgcaataccaaaagttaatctattttcactaatgacattgaaaatacttgatgctaaactagatacatcattcttatcatctaatgatgaaatacagttagcaatgaatcttcttatttggttaccaaactcacaatgaaattttttaccattatccaaagtatcaactgaaaaatgtgatgatttcatagtaaatgggaggaaaacattggaaataaatttaatatcatgtttaaacagacttaaactttcctttggtaaactaaatgtcaattttaatgcaaactttttaattttatccattgaagctttaaaaccaactgataaaatagtaagagaaaatggaactggaattttagaatttttagagaaaatattgagtaaatcattagttgcagcctgagcttgattcattgcagcatcaatccctaaaatttcatataatgtacagaatcttttccaactatcaatatattcttctgtctcagatacgtcccattgcatgattggcaatgaaatgtcagtagagattgattgaacagacatttgaataagtgttaaagaaaactttttatgttcatgagaaagacttattaaaccattccttaaaaatgtccagtaatcttccaagttaagtattttttgaaattctgaatttgaaagcaagttttctggtctaaagtagtcaaagaatcttaaccataagacataaccataagaaatttcagtattgtttttagatttttcaagttgaaaaatgatcttccataataactctgtattttcacaaattgactcaattctccatttaagaattttggaacaagtttttgagatttcaagttcttcatttgttagatatgtgtaacataaaccgttaagtttgtcgttgctgataataatagtttcattattggtgaaaaaccattctaaaaatctaagtaggttcaaaacgtatttgttagataactcataatcaactacagatgatgggatttcaataagtttggatatcttttcattaaaatgtctaggatttgtttttaaataaatgattaatttatcagttacataattaattaattcttcaggcaagttttgaatccttaatatttaatagtttgaaaatcaaattgtagtgactagatggatcttcaagtttcaagattctgatacagtatttcctaagaatgtcaagatttttatcagattgattagttgaaagctcacaaaaagtgtcaatatatggcatatgtaattcatattgttcgttttcagttaggtatccaagaacatcattaatgagtcctgttttttgaccaacatcgagttgtttaagtaccaatgaaagcgatgtcgtcattgattatatagaagcaaaggaccccaaaagaacattaaaataaaatttattatgcacctccgttataaaatttttttttgacttaacgcttaatattattttttaatttttcgttattgaggatattgttttcgaattgtaactcaatgactttatcattgataagttcaattgacttcatcttctctctcatctcttcaactaacttgttatactttatatcaagcttcctgtatttcatctcgtattttttccttgtcagaaatggcagttccataaactaccattagatcgtgattaattttctctttttcaaaaacttgtgattccaacgatttgacttttttctccaacgattctagtttattcaaactactgtttagcaattgaacagtttcatcactctgtaactcctcacagcgtgttttatagtatagtgtctgattactcatgtaatcaactttttaaaaaaaatgttagtattcatagattcctctaaattatttattgcatcgtaatcaaaacatacgggtattgtaaagcccataactttgtattttatcacgttcatccaaacgcttttcgatttcttttaaccacattaacttgtcgttgttttgttgataaagaaactcagtgacggcgtataactaaaaacagatttagtgatgagggaaatttgttattttttttaagtacccagttatactgtattagcttttcttatcattaaagataaaatggagtcaaatgacaatgaacatgaagcattgaacaaccggagaggctctttttggcatatatggagtgatagtgatgaagtgaaagagaatgaaggtgatggatggaatattggtcgacgaatgagtaccttatcatttattggacgagcacaacctgttgtaatgcgtagtgtaagttttgaagaaatagtagaggaaagtaggtggtggaatccaatgacatggagaggaactggagtggtagaagttgaaagtaatggagaaatattaagtgctggtatagtggaagatgaattgaataaattacaaaggaaagaaattgtcaatcaaattaaatgtttatcttacggaattcccagtagtaaaaattgggcagtattccgtagtgatgatgatttgaaataccctgaaattatattaagtggagtaagtggttgtaataaacctgttagagtgaaggaagttcctgtgtcaatgtttgaaatttatgaacgtaatttgaagaaaacggatacagccttgatacacaatgaaagtttagttttaccggagattgaaaataattatcgtgtaaatacactgagaagtgaagcaaggatcaggttaagtcaatacgttagaggatttactcctcagagacatttatatttacaaaatatgaaaaatgctcaaaagagttataaacgtgcatttgtgctaagtattcatgggtttttaccacagaaaattgtaagaaatatcataggagaaagtagtttaaacagtgaattgatgacaaagaaagttgtttcctgaaatgaaaagatggggagatattaacaatgtggacattaactttcaaacattatccgtggagggatacggtaaacgagaagatagagtgaatgagatcatagaaatcataaaagattgggatgaagagattaaaaaatgtgaatattttgtttgtgttagcaatggcatgaattgttcaataagtttgaaagttttgaaatttttagttgatgaaggtttgttatctaatgaaatacaagactaagttaggatttattagtttaggaggtgcatattatggagctttagaatcaattgaaagtaaaatcagcaatcgtgggaatgttggtcaagatgcagaaataatcagtgaaatgtttggaatgagtgaaagtgaagtatttgaagattttgaaattcttttgaaggaaaattttaaagttagtttagttggatcattaaatgattgttttgttggaatccattcaagtttattattagatattgatcattgcaacatttataggaatatattcattgatggtaaggaaaatctaagtgattttcttattagtttaattgaattaattgtcatagtgaagaatttaaaatataaagattatcaattattaaatgagataagtcaatattttcaaggtaatgttggagaaggtggacatttcactatgatggaagataagaatagttatcgtaatggtattaagtttatgatggatacatctaattcaatatatgatgaaacattgaaaaaagttgaattccgaaatgaatgtaatgattatcatattccatggagtttaagaggatttgttgaagaagtaattggattgaaaagaattgaagcaactgagacattaaaaggattacatgaagaatatttagtttgggaacccgtagagggtaaaatgaaagaattaaaagtttgtatggaaggatttgctggggtccttagtgagttatagatttgttttgaaaaattaagaaaatgaaagtttgtaatgacatgtgtataaaaatgagttcataagattttataaatactcttatcgtatagttattactattactgttaactataattaattgattcattagaagaaggtattcttttttcagtgatgattttatttatatatgaaaagattggatgatttgttaggaaatttataatttttcattggaaattccccttttcgcaaaaatattcgctttaaaatgagcatcatcgagtatacatcactgacctctttgaagtatagtagaggctatatttaagttaaattataacatcaaatgtccagtactgatgaagatacccgtacaaggggtaatactataacagtagaaccaaatgaaattactgaaactactacaaattctattataacgactgagaataatacatcattttcaattagattaacgcccgctattgatcattcaatgacaagggcatatatgtttggaccaatgcttcgacgtgttaaaattgcaacatcatttacagttggacgtcatacagataaggcaattaattctaatttaaatgattgtataacatttaaaagtaaggttgtttcacgtaaacatgcaattcttaatgttgataatatgggtaattggtatgtaacagatgttggatcatcaagtggtacatttgttaatcaagttagactttcaccaccaaatgaggcatcaaagataccaataaaactgaatgatggagatttagttcaatttggagttgattatagaggtggatcagaggatgtttatagagctgtacgaatgagagttgaaattaatgatagttggatacgacgagcatcaggatttgctaaaaatgcaagggcacaacttgatgcattaacagttgctacaacatgtgttatatgccttgaagatgttcatgttggagagagtgcattcttagcaggatgtggtcactgttggcattaccgttgtattagaccgttattggtgaaaacgtatccacaatttctttgccccaattgtaaatgtgtttctgatcttgaacactcattagacgaatagagtgaggataatactagctcaataatcattacgacattatacgacattatacaagatacttaatcaataaaataacaataataatggatctgacaggaataaaaggtacgagtccgaaatctccgaaacgtgtgaagcaaaacgggaaaaataaatttaaaattcgctatatatgtcaatcacattggacagaacttaacggagaaagtaatttctcaatacaggtattatcatcaacaatcctcacaacagcactggttgacatcttgtccgctataagtttaactcatatatgctcccccatttatttttaattgatatataatctactcataatcttctcatattttcctttgattgctgttttcattctaaatttattccttcattttgtttattattttactttactttattttaaccttaatattttatttctattttatttatttcttttaagtaagcaaaggaaatttaaataaagaaataaaatggctgacgtcttcaacgttcaaattttctttatcgtcttcagagaagcccttgaagcggtcgttgttatctctgttcttttagccttcgttaaacaatctattggttcagaaaataaagctttagctaaaaaattaaagatccaagtttgggctggttcaattgctggtattattctttgtcttggtattggtggtggtttcattggtgcttactatactttaggtaaagatatttggggtggtgcagaagatttatgggaaggtattttctgtattattgcaactgttcttatttcattccttggtattgctatggttagaattaataaattacaaaagaaatggagaattaagattgctcgtgctattatgactccacctccaaagaaatctgaacgttttaagattggttaccttttaaagaaatattctcttttcatcttaccttttattacaactttaagagaaggtttagaagctgtcgttttcgtcggtggtgttggtatttctgaagcctcagcaagagctttcccattacctgtcgtttgtggtcttatcgctggtattgcagttggtactttcatgtattatggtggttcaagagtttcattacaaattttcctttgtatctcaactgcaattctttatttaattgctgcaggtcttttctcaagaggtatctggtatttacaagctaatgaatttaataagaaaactggcggtgatgcttcagaatctggttcaggtcctggttcttatgatattacagaaactgtttggcacgttaattgttgtaaccctgaaattgataatggttgggatattttcaatgcattattgggctggcaaaacaccggaacttatggttcagttatttcttacaatatttactggttatcacttatcgttatcttaggtttaatgctttacgaggaaagacatgatcaccttcctttcgttaaattttcattcagacatttaaatcctttctattatattaagggtaagaaagatttaactgaagaagaagaagaactgttattccaccaagctaagatgcacatgaatgaacaagcaaatgttaaggctccagctgaagaaattgaacttcattaaaattaatcttttcttgtatccttctttataaaaatagctttttctcgttatataatctacaatatatataattttttgatataactacttaatattttaaattagcttcttgctctttctacgtttaattctcacggagttttccttatcattatttccactccgtttaaccatatcccaaattaataaaaattccaaatatttttcattatccttttccacataactttcaataagtttttcaactttaactcttaaaatatcgtaaatcttaatattctcgatttcactttcgttttcaaacatccatctaacaataactaattttagaacttcccataaaattttttgctctctatcattcataaaattgatacccataaaattatctacaaagatacgttcattgaaatctacaatatcacaatatccaactatctcaactaaaatcttcattccatcattgaagatattgccattggcatgactcaatgattcaaccattgtccttattataacatttagaaattggaaagtaatcagaacatcactttcaaaacaaaatgaatgaataaaagattaagtatatttctaatctgatttcatcaacaattcctgcattcaataccaattctttgaaaaaaatcaactttattaataactttttctagaactattttttgaaaattattatcacttaatgcacatcttaacatcttgagagaatttaaatttttacctttcttgaaatcagttagaatttttctatcaagtattttgaatgccttgtttacaccctttagactaacttttacatcattttgtaaacgattttcaaattcttcccaatttccataaatattaccaatatagacatagtaatatccaggacctatcatagacatattaattgtatgcaacttactattacttatatccccatttaggttatcctcagatctactagcaaaaccattcaatccataatcactaccatcgttatcgtcatcgtcatcgtcatcttccatcattaatgaaatattttgaaattgtgtgtcactagctaaagagagaggactaatatctctacttttctctttatatttagaaacaggagttttcaaaatacttgatcttgaaacagctcttgctgaataaaacttctcatcattatcattaccatagctattatcgttaccattttcctgctctttttcagcatacacatcaataagattaccataaatatcctcattttttttattcttccagaataaagctttatccctaattttcttggacaattcccattgagcaacataattattatcattgagtttatttttatcatactcattatcatccttaacttcggcagtaaaaatatgctccaaagcatttatatcagtatcctcatcctcatttgaatgaaacatataaactgtaacagctaagacaccacccattataagagcaattgttgtaaaacatgcaataaatccataaaacttaacttgatgactcaattctgtaattttttcatcacaaatatcgtcaatatagtaaaggaacaaatccatcatatcatcatttagcaattcttgcgttgctgtttccgaagctatatcctatagttagtaattcagttcagatttgaaggctacacaaaacttaggggtcagatagttactctctgcaacggagggcataaaactgcttataaactcatctagaatgaaagtcatctttgtctataggaagaagtaagcattgattacagtaataaaaaatgaactgagccttcgtgaaattttgattcaaattgagaatatttttgcccgttttcctgatggtgggcgcttcttataatttaagaatcataatattgttattatgctccttgttataattttttaatgttgatcaacagtttaattcaaatcagttgtaatatatctgtaataattcaaaccgatataatttataggaaaaagaagattttttttttaatgaagttgtagtgacactatcaggaagaaccagtttatgtagttatatgacaattccagatttagtataatctgagatctattaaagaaatacttttttactatttctacagagcaaagttttaatacttcatacatgcaatcgggttcaaaggaagaaatataaggaggaagaatgaatttcagttcggtgaaactatccgagaaatatttgttactattataatacatttaattggttggattccaatttcttatatttagaatatccaaattttctaaatgtatattcagttcaattacatacaaatataatattcttattacttgagtaacactttcacaaccaaaaaataatgacaaaaaaaaaataattttgatattgtcataactcatgcatgtgatataacataggaaaaaaacatttatattaacgaataaataagatatatagagtgtatgtgttataaaaccattatgatcatacagtatttttgaaattctttgggccttcttcgtatcttggtggagcatttctatcatacataataccacctggtctctttggtggaataattggatctggatgtttaaatttagctaataattctttagtattatttaaaactctctctaattcaagtggatcggatatatttttattttgttcaaatcttaatctaatttcagctgccttttctctatagaatgaattttgattaatccaattctttgcagttcttaatgattctctatataatgatgcaacatatttagcattttgtgctgaaaatggtactggagctggcattattgtgcgtgttatatacctcttgaaatgaaacttcttctaaaatagacaaacattacaatcagtagaatcaatatttcacttttacaagcggggagtagaaaaaatagtaatagtttgtaaaatttaatgtagagtgcacggatgtaaatactgtagacgcgtcgcacagtttcccctttaggtaattatctggtaacatgaatttcccagtctgtttgatttggtgtcagtttgtcttcagttagagagtatacgagttataataggacgtgaagtatggtttcaagtaggtcagggactccaggaagtgctagacagaagaagaaatacaaaccaactgctgcttcggaaatatctattgaagttccacgaggttgtttgacatgtaggaaaatccataaacgctgtgatcgtgtatctcccgtttgtggaagttgtacaaaaagaaaatatgaatgttattggagaaaaccaggtacaaaatttaaagattatgaaattgagttggtgaaaacagcctatcctaaaggttgtactttagatcctattttaaataaagagatggaatataaaatatctgattctaatgcaaagaaaatcgcagatgcagcatttagatatggcaaatgaactgggaataattgaagaattaggcttagatatagtagatgaaaatacggcaatgactgatattcgtgatagatatggttaccaagatataccgttacttggaacatcagaagaagaaaactcagataatgatgaaaaagctgcaaatagtaaggatacccaaaaagaaaagaaattaaatgcgaagaaaaattcaaaacctaaacaaagaactaaaacaaaaatcactgttaggaatgtttataaaaaagataagccgccagagaagcccaaaaagacactaaaaaaacctaaacatattaaaaaggaaaacgaatcatcaaacagtcataagaagagtgttaaaaaagagtatagcgatgattctactgaagattcaagtagtgacgaaagtgacggggaatttatagtaaagaaagaagaagaaaatctagataccaaacaactcacaaaatcagaagtaagaaattatgaaagagatgataccgatgaatctagtgacgaagaaatcgatgaagaagaaaaagaagaagacgaagaagaagatagagataatttaaataaaaattccagtattaatgatattgatataaagaacgagtttgaagaggataacgtcaacgatcaagatttctccattcctgaaaattttgagagaatttctgatttgaagaacgtagaaactggtgaagaagactatataccacagaaaacaactaaagcgattgaaagacaagatgataagaaggatgatgaacaagaggagaatgatgatgatgatgatgatgatgatgatgatgaagatgacgacgatgacgaattttttgatgcaccgacttatcaaactgcttcacaagatacgactgatatagtaactgaacaagaaaacactttgagtaagaatgccattttttctgacaaagacaatgaagaaaaattcgccccagttcaagatgaagaaatgacgattgataacactgaacaaaaagatacaacaacagaaagcataaaagaaccagatactgaaaatacagatttaattggatctaatattcaagatgaaagaacaaataaaacctcagaacatataccccctaaagccagttattctcaggacatagaaaaacagacaaccaataatttaaattctcaaaactttttaaactcacctattaaccaatatactcaaagtcaaaactcatatcaacaggatgcacaaaccgatgattattttgtgttacagtcatcgcctaattcttttgcagaaaatgatctgaagtctacgcaatcatcaacgcaatcatcaacacaatcttcttccacatcagtaaaaatcgaaatcggaagtagtgacatgtttcattctagattagaatccagtattaataaacgaccaaatttgtcttcccaatcatcttcccaatcattagatgaagaaaaaatacagaaaattagaacgttaattagttcagaagaagagactaatgatgtagttgttcccgaagggtcaactttacaatccacatctaacggaatgaattggtatactaagcatctggctgatttatcagataaaaaaaacgataatgctaaaccatcagctagatttgttttcaagtgagcaagtcaataacctaaaaactttaatcaaggaaagtggttccaatgaaatggatacaatatcccaaatttcagataaaaataaaaagccaattaagatcaccaaaaaacaattagaaggtagtatgattggtgaagtagaaatagaattaaaagatgctacagagggcgatgctagtgaaattgatcccgacgatgagcttagaattagggctgattttgcttctcgaaagaggaaacgcccaagcaagatatacggagttgatgatgattccgtggagaacgaccaatttttaaatggaaaggatcttgtatcttcccaaacgaatagaaacgaaacaatggatgctacattctttaacacaattccagacatacctcaaaatgattatgttgatggtactttaactcattcaccgtcaaaaaaactaaagaaatcatttcaaaactcaaacgatagactaacaaaacaaaaattaaaagagcttaattttgaaacagaagaacaggctcgattgctactagttgaatcaatagaatcagccggaaaagccgatgtaaaaagacttcaaagtgatggtcgaagaagtcgttacaataaggtaaaacatgtagaagtggataaattaccattcaacattgctaaatttttgaaaccaacgtaaaggttcaaaacattgttcgttattttatactaaatttgctacatattttttatcccaattgctacttgtgtaatttatagatatttgtattatattaattgtttatcaacaacaaaatttcatgttttcaaacaaaaagcacttcaaccgtttatatcaaatcttttgtaaaattgcatgggggatttactgagacagaaacttacgcccaaaaaaatctccgtcaaaatacctgtccattgttttttttttgttctctggttaaacgttctttcttcctttctctaccacatacttacccaattctgagccagcgaatagctttcagcttaatagaaagaacaagcaatgtcccaggaattgaaacaaagggtcaatggctcttcagaaaaaagtgaagttgaatttgcttctaagaactccaatttacttgaaatttcaccagattttgcaattaaagttcttttcaaacatgatcctaaaaagaaagctacagatttagaatctgaagcaaatttaaagattctgttaacttttttgaaaatcaatggttttgaagttaacgttcgtcctgacaccaacacaaattatatgattttgtttattactataaccgaaacatcattcaataaactagtcacggtttcaaaccaaattgactcgttattcaatgttaaggaaaatgcaacaagcgatgagaaaatttcacttgctgaaagattaagattaatttacctgaaattgactttaccaaaatcaaaaggtgggtgtgaaattgaagttggtaagaataatgttgtaagtatcttaccagtcaaacatattttgaatttagaaaaggaaacttcctctaattggaaaaatatgggtaaaatgtttagaaacgatgttcgtcataagaatgttagatttttaaaagagaatttaggcacaaaatatgccatctactacagatttgtccaagcctatgtttcatcagttggatgtatttcattaatgggtattttggcatggtatttctttggaaactattccctaatctacgcagccgctaatctagttgttggtctaacttgttactcttgtatctatgcaactgagaagaaaaccgagagagattggaatttagaaaacatcgacaaaacccaaaccgtatttctggaagattctgaattgattccaacatggaaaacattaattcgtcaaactgcatatatcccaattactcttttgagtgcaactggtttgttttctgttcaatttttatgcttccttcttgaaattttcatcacagaaatttatcaaggtccattgcaatcaattttagcattaattccaactatcttagtatgtgttttagttccagttggcacaataatttacggtatcatatccaaacaatatcttaaatttgaaaaaaacccaactaaagaagatgaaaacaaatcattgctgataaaaatgtttgttttcaactgtttagcatcatactccccattacttattactgcttttatatatttacctgttggttacatgttgaatccatatcttcaaaccatccaagcattagtatcaagagctacatccgttcattcttacattccaaagatttccacattagaatctcaatatcaagttaacaatttaagaatgtcaagtcaaattttttactttatggttattaatcaagttattggtacatttgttgaatttgtagttcctatcgttttatcaaaagttcttaacatttccaaaattgcaagtattttaggtaccccagcatcagcaaaaactgttgactttaaaaatgttgatgatcctgaagaacacgactttttagagattgtacgtgcagactttttgaaaccagagattagcattgatgatgattatagacaacatgttttacaatacggattcttaatgctttttggacctgtatggtgtttaggtgctttaagttgttttgttttcggtttagttcaacaagaaggtgattatatcaagttcatcaaactttcgaaaccagccgttggtgcacgtagctcatcttctcaaccatgggtatcatttatgcgttacttacttattattggatcatttgtttcaattgctattactttgatgtataataacaatgctgacgatgttaatgaaatcagttgttatgtcaatcaaacctgtgtcgaaaacacttggtacactataatttttggatcagttgcttcaggtattttgatgcagattttagtccactctgtcgaaaccattgttgacaaagtttatgatgataaagaaaatgaagacttccaaaatgaaataaaagcaaattcattattcacctccttgactgaaagaagcgaagaagatgagtcaaacttaaacattgaagatcttttagtcaaggcaactcagattcaaacatctttttgattaaaagaatttacttatttttatactaacaattatttgaaagaaaactctattatatattatatcttacacatttataacatcaactctcgaacgtttactcaaggtagttaaataattttgtgtaacctcctcttcgtcatcatcttcatttgtaggattcattacagtgtctaaatcttcgaaatctggagttttcacttgtaacagaacataagtaccaccattaccgtcaggacgaataaaagaaccagggtttatcaccaaaacatttttgataaatttagcaaatggtttcagaactgatggtataatgaaaacatcaggtatactggtatctaactctgctaaaccaagaaatgaagtatctacttgaaaatttggatttggtgtgggactaattggatagaagtgtctttgataaagaagatgttcaacaattctttcaattctgttggtgtttgtattatttgttggcacgtctttcatatctcttagtatatcagcatttgatgcaccaaatgaaacctcatttaaactaaacaatgaaggattaggaaaacatttgaattgtttatttagccctaaagttttcctgttaaaagcagcttgtggatatggcgtatgagggttgacaatatctgatccatgtggtaggaggataactttcgaacattgaatttcatttaaaatcggtgctaaataagatctgaaaatatcatccaaattctttaaatcatccaaatcatcatcacttttcaaaaacaatttgtttaaaatatttggaatacaattaatatcgataagcggtccattcattataatgacatccggtttaatttcttcattagcatgtttaataaagttttccaaccttgagaaattcaaagaatgttttgaatgataaggtcctgcagttactaaaacttttaaattatcatcaccaagaatgtttgagaaagcctcaatatcttcaaaagaatgtgtactagcacccaagtagtgaagttttaaattatctaacactttaaagcaatccccagctgcattaatacctctgaatgcaactatttgaccagggaaaaaggaaaaattagtaacatttgagagatctacaggaattctaatcccaaacccactcactctggaagtttctaaaaataaggattgcaaatttaaatctgttgagccggaattcaaaggactgtcaggaacaattcttccaacagtgtatatttctgattgtgattgacgcgttgggtctccaaacttagattcatctatatcataatgctttgcaacaatttctgtaaatatttcaattctttcatctaaataatcagcaatgtctaataattttaaattcatagtcctatatttatatttttcttttttaaaatcagctaaaattttaatattcttattaaaaattgttgtttgtttatcttggatattgttagtgttcaaagactcaactatttggtttgattttacaacagttgaagtatttgctgattcagatgcataactatttggagatgatgatatattcagttttctctttttgataatgctagtatcagcatcgtggttgaagctggtatttgcacttgttttactttgtaatgaatgcttggtgtttagtttcaaagaatccatagcatctaacttgtttttttcagtaattgttctttgtatatatttttgtaaaagttcaaggttctccagacttattttagttttagtatcctttaattctgtataagtaaatgattcccagtttgagaatagatcttgagaggatagtccaaacaaagagcataatttatcacatttttgggtaatcaaagggtcatttgctgctggaccaaacgttttcacatatgaagattctgtcatggtgctgtattccaatagttgatttaacaaatagatatatcaatgaccaacacgataaaaataaatcattaaaatatcaaaaaacaccaaaatgtggaaatcatcatcaatattgaaaacatgtcgacgcgtaaaatttgaaaattttggcttttatgaaaaatgcattcgtcatttaaaaatcgattaaatgaattatttcaactgaaacaataactgttgctgctcttaatttatcttacatcgacattgtttgtaatcatattaattcttttttaaatgaagtggaagaaagccgggctcatcggtaccactaatttatagtattaccacagagatttaatattatattgttgtcaatggagaatataaaagttgaaggtgatgataatgatgccacattggctgtgctgacaaaacacatcgatatatactcagaagtttgacgagttttccacatttagacgataaaacaaaaactgaaatttataaacgtgttgatgactacgataagagcaacgcaagtttgaaccctactagtaaaacgcatattaagggcgaaaatccatttgatagacgtatgaagtcaatacaattgtcagttcttgatgattccaaagctattagatatgatggtgattggatgtatcgtaggtgcaataattgttattttcataaacgtaaagaatgcgtcacattgacaccaacagcgatcaagaatatgatttccatcattcctttaaataaaagctccaactttatacgtagatattaattctattataaagcaagcttttttagttgccaagggtactttatttccacacaaggtcaaagtttgtgctcactcagatccagctatttgttacactatcaaacagtcattgcctgaacatgtcattgattatattgaaagaatctgtctcaaaataaaattaaattctgtttttttacttagttaagctataaagtttttggatatcccagttaatccagaaaaattgttaattcaagctagtgccattaaattggaaaatggtaattacaagaaattgactgaagacattatggaaatatgtcatggttttgaaatattttgtattgatcccgaaaaggaaaaattacatcaaaaaattgttgaaggaaacaaaaatctatttcctccagatttgatatcgaaaattgaacagggtatggatttttctgactttttaacttatattacagtgatgtgtagatcttcatctagaccgaaacctaaatcagaaactaaaaaaattgcagaacagagactttctagccaatggtggtgaacttgctcaacaatatccataatagagagaatgatgatgaattataaaattttatccatatcaatttaggtaaatcatgaattctttaatgacatgtacactattacatttatttaatctatctatctaaactaatttaaaaagttattatattaagtgacaaagttatacagattgaaagcttataaataattaatatacccataaaatgttttatatctattttagaaaagaaactaattaactaatctctttctttaacatcaacttcttctgcttttctaacaggtgaagcatctctttcctttgtatcttttgcttcagcagattccttagattcttcatctttagaatcttcctttctacctctcttcttattcttattacccttattacctcttctttcaccgaatttttgtgctttactttcatcataagaagttttactgataacatctaattctacagctgcatcaccttcaccatattttaatttgttttctgttatatcagccaatattttttcagcatctttagcatctttaaattcaacaatacatgaaccagtaaatttcttttctctgtttttcttcattctaacttgattagttggtgcaattgatctgaaaaattttaataaatcatctaaagttgcagtttctggtaatttttcaacaaagattgatctcttattaatatttaattgaatttcattataattttttggtaaagcaatttttcttctaaccatttcaccattttcggaaacttctaataattctggtgattttcttaaagcttcaacaatgacttcaattggtctatatttcttcattctttcaaattgagagatagtttgaattggaacccatccatcattagcattttgagtagtgaaaaggaatctatcatttaaaaggtttgattctgaaaaataaaactccacttgttgaagaatactttgttgtgtttgttcgtctgtagttgacatatctattggtatttttgataataggaaacaactacaaaactctaaaataagtatacaaattcatgaaagaaaaattgatcagaaaaccaaaaaaaaaaaaaaattttgcagtgaagaaaacgaaattttcagattttctttgaggaacttctaagaaagttcccagggtctttagaggggggtgttgatgctgactctcaagggcatctaccgtgtacattccttgtatattggtattgttattacttgcttcttatgatcaattgtatactctgataatctgagaggataccatcattatctttaatgcttgatttgtcactgtattgcgtaagaatatcgtctattattcaaaccttgataagaaaaatccccccataaacctttaacaggaacgatttgatcttgtaaatcatatctcataaaacgtctaaaactccaacaattacattcccatacaatggaattgaggagttttcattattccagttattcacaacattaacaattcgggaaacgtatttattcacaacacctgcacaacttacaatacataattcaacatgtttgtccaaatcttccatatctttccttaaattcatgttttcaaactcttccatggttaatagtataacatgttggtcatccttaaacagttttctcagttgatatccacaatcaactattaaacaaacacttttattacccattggcttatttttaatagtttcaaccatataccataaataacctatccaatcacgggtactagtgtatcttacaacacatccatatgatgattgtaaaagatccaattgaccttccatatgtaatttcgaagttgttagatattctctgtaccctgacacgaaatgtttcacctcctctatcgattcatgtttgtcgcttacttggatcaagtcaatcagcttaaactcttgaacagctggttcggtcatctcttaatatgtaagagtttaggaaaaagtaataaataccgtgcttttgaaaattataaaaatatttaagaaaaagtgaaagaaaggaagtgtagataatatacaattgcagaagaaaggtaagttctaattaaaattcatcaataattcttctacaaggtatgcaaaaactggaacataaagattatcattaacatcaacaatcccttcaaataatgcacttaaaacggcaaccatacatctatttgtccagtttagcacttctagtttatcattaccactaccattgatataatcaagtaaaatatatcctaaaaaggtacaaatacccattgtaatactaccttcaatggatttattagacattggccatttactataaccaactttactaccaacaattgaagcaaatgaatcacctaaacctaatgtaattaaaccaatataactactttcttttaatccatcaacattatttaaccaaaatggaagtgaaacaccgattaataaataaatataacttaaggtaaatttaccatcattatccttttcatcttcaaaatttctaaataattccttaatggatttaccaaatggtggcaattcattagatctaatcatttcaacaacaactaataaacctaaaataccaaataatgcaattgaaactaattcaggttgttccttcattggtttaacgagcataccaaatagaacaaaatgccaaattttacgtttaatacttaaattaacggttgggaaaactttattgaataatatgaaaatggttggtattaaaacaattgttgcaataatccaagcttggaaaatatctgttctttcctttgaagatttaataaattcaattaaccaattaaggtgaaattgatttaatacgggtaataataatttatcactaataatcaaaccagccgctgaaaagattaagtaaatggcaaataaccatgtatatttcaaacttttctcaacttgacctttgtataattctaaaattggtgatgcaaaaattgtaccaactgtaaatgataagactaaatttttcataatgaataaagtaatattactatcttgaattgttataaagtatgataatgcaacatataaaattgaaaaaaaagatttttcataaattggaagttcattaccaacaaatttattaatcatttcaaagaagaaacaatggccaattgggagaagaagcaaatgagctgtaattcttccagttgaaaattgaattaaaataacgtatgagattaatgtacgcacaaacatattcatataaccaagttgtgcaacacaacatgaaataacaataactttgtttggtgctttaagtaaacaaattgctaatggtaaataaactgaataaatgtaattaaaatctaataattgtggtttaattgtagtcttgttcttattgaattgagtaaatctagagtttaaaactgcaaatccttcaagtaaaatagctaaaaggatacatgatgtatttacaatataatccattgcattttcatcaccattatcttctctctctttgaaaactaaataaagtaaatttgtgacaaagaataacatgaataattggaaaacatgtctagtattaatataaatatcaactaatcccatataatatgagaaaacaccttgatctgcttgttctgctaattttgattccttttcttcaatagtttcctcaggttcttcatcttgaatattcttattgtcattggtagtcttattagtttcatatacttcatctaattcataatctaacacggtttccttatttttagaggaacgatgagtgacagttgacccactctttttacccttgttattcttctttggtggcattgtccctaactattcaatctcaaatataaaagaacttatacacccagtagaagcagctatttaaaataaaatagtggagtgcatcgagtgtttcctcccattgcgtccactgcgatgaaaaactctaagttctactgataacgcaatctttaacttttcaatgctattaggcattacaaaacatgtgtctttatatgataacgattaatatacaaatcaattatcgttctgtgattataatagtagcttattaaattgattttaaacataagtaggtgtctataaaatataaattacgaaaaatgtagtcacattacggatattaatggccattatttggtggtcttgatccgaaaatacttgaaccaacacggacattggtacttccttgtttaatggcttgtacaaaatctccactcatacccatactgatttgaatatcacttaaattaaatttagaaataacatgttcctttaactcagctaacaatgaaaattcagggttcaatccttcactatgagatgcaccatatgaaccaattgtcattaaaccatggaattctaaacaatcacattcctctaagataactttaattaattcatccaattcatcaccaggttgacatccactcttttgttcctcaccagatgtattaacttgaacacaaactccaactttcccaaaatttgatggatcttcacttaatcatttgctttcgagtatcatttaatttctttgccctttttaatagtatcaatagtttcaacgacatataaatttgtaatattcttagataaatctttacatttattagtttgtaaaccaccaataaaatgccatttgatatcctttggtaaaacttttgccttttcaattaattcttgaacataattttcaccaaaatgacggtatcctgcatcatataatgcttgaatatcacttgctggtttaagtttagaaacacagactaatgtagttttaccattacttaaattatgaacttcgtttttaattgaattagcattttcaattaattctcctgctctttcttgtgtagtaagctaaagacatattaggaatatattgtttatataatagttgtgaagtactaaaaaaccgtttacctatacagagcatttaacttcaaaagaaaaggattataataggtatataggtaaggtcattcaatgaaatttaatttattataaaactgaaatcaaatactttctaaaagtggaacaacgcgctcacaaatcatcaagggtccaccccatggattggtacatctaatttcaattgaatcaccagttactaccattaatacacccagagtgatagattgaacacagagaagtgatccacacatgatactgaaaccttcatttgattcaatttctgtagcaacaacttcaaaattgacatttttcaagtatctacttgctaccttaataaattcttctgcacttttacctgaaggtgaatttataactcatttgaccaattgatccactttctttacctaagttaccctaattgagaccacctactttgaaaaacaggtaagctcatacctttaccttcacttgtatgtaaagttttcaaacataacgataatttcaaattgacaatagtatcatcaaaagcaaaactaacaacaggttctttctcacatgaatacatctttctgcaatgcaaagttaaaacttcatcgtcccttcattatcatttttgacaataccattaatttttaaatcagaatcattatatgaatcttctataattaaacatttaactctagattccgtcccttctttaagtttataagtcaaacttacaaatcccatatttttctcttttttaaccttataaataacttttaaaccatccttattatataaaataccttggtcaaacttaagaaatcttaaaaaatcattttcccagccttcagttaatattattcccttatctttaattttgggtgatattaattgtggtaaagaatttatactatcaatagtaatggaaagatcaagtttaatatcatgtttgattaacattgaatattcaaatgctctttgtctaattgctatattaatatgttcagattcttgttcaaatgctaattgaattaaatctttcatattttcatcttctataatattataaaatgaactcatcacatctaaaatcaataattttgttgatattgatgcagtttcatatttttcaataattaattttaactgcatagataaatcaccagctttccagtcttttaagttttttaaaaatacaagtaacgatagtttaataaaattttcacaacatccaactgttaatgctttacaaataaattctagaattgttataataatatcgttatgaccatccttaccattcattttacttgttgcatattcaataagtttataagctctctcgaatgaattctcttcataatttccaattgttattaaaactcttaaaactttccttgccgtttcttgaataataccactttctttataattctccaaaattgttaaaatttcagataatatttcacctctggtcatatattcacatgcctgtagatgatacagtaaaattatcaccacttctttgatttgtgaaaaagtaatattctcatcgccagttttatcagtatttaaagtttgaataagtattttgcatgttaagtttttcaaacttgtatctttatcacgtataaatttcctccaaatattaaattcatttaaaattttagttctaccattccccaaattattattattctcaagaatctctaataattttttcatatacagaaatcttacattcaaattagtgttaaatttaatgaatgatacaactgaatcaatgacaacccctgtctctgcagagtttgaaccatcctctttcccaatattattagtgtataatgataaacacgttaaaagcacatttgcattaagcaattgatacttactattatttggttccacttcattaaaaatttttgctctgattccaatacaattattaatcaaaaatgtgacatgattattaagttgagatattttactatcagatttaacagttgttatatttcttaacgtattcaacaatgcaattgtgacataaccgtattttaaaatccaatcataattttttatttgctttttatcattttctgattgaatagattttacagtttgtataatttctgatattttcgtaattaataaaccttctaaacttttaataccttcccaatcaaatttaatccattgatctaaaagtttacataacgaaattataatatttggacctgataatgaagtttgtgcaaatgttttacccactaatgccagattatctcttgttaaaacatatttttctattcctttatgatttaatttaaataattgagcaatacacataattaatcttggttttgtatattttttgaaaacattatcttgatcatcatgatttaataattggaacaaggatgttgtgaaatctttcatgaatggtttatccaatatttcaccgtcaacaaaattgaaaatttcacctatatcctgtaattcattaccgattattgtccataaagtatctttaagttttggaaaatgttcagaatgctcatatttaacaattgaattaatatctgaacttgcattagttatgatcaattcaagttcatttattttcaaatatcttgcaaacaatttctttaatgctaaagaagcagtacgacgagtttccaatacatcatttaaatcattgaccttatcattatcctctattataggtgatttgataagttttaaacattgttcaattgcaaattttctaatttcttcttgacttatctcatgtccaacaccatttggattcaatactgataattcatatcctgataatttgatatacattaattgacaaatattttgaagtataagataatctgaattatttggatctttaagttgtttatagattattcttaattgattgtttattttattaaattcatcatttttagtagacgattgtcttacatttgtaataaattgtttcaaaccattcatagacattctgttcttgtctatatctatatctacagggaagaaaaacaagatctaaacagagatctctgagctagcattgagatgcttccgtaaaagtcaagtggttccgatttgttgcgtgaatattacattacgtaatttatttatattgatttgatttgttttgtcttatattatacagtaaatatcaaataagtaaagtagttaagaagtctagagggttttttaaagtaaagagtaaactgaaatgaatgtctttttgaagtaaatgagtgaaaagttttatttaataatggattgatttaaatgaatgaaattaaacattagcattatccatttgtttacgtaaatctaattgggaaccactatgaggtattaaattctctgcaccatgaggtctttcaggtacattatcataaaatccatataatggaccattaagtactggactaccaggtggtataaatccatcatcattattttgaaacttatttaatttacgaacacgttcctttgcagtaccttttgaaacataagttgaatttttacttaaaccaactggattgaacataacaattgaatttctaatttgacttggacttggtgcatcagctgtttgttcagttttccaattaacatgattaattggattaaaattttgatcaattggcattgcaggatgtgttacaggatttttatgagaatctgctgtaaatgttgtaaatgattctaatgttgatgtacgtttatttaattgatgaggtaatggaagttttctccagttttggtaaatttcttgatgaattggaatattgttgtgatctttgatttgatgcatatccataagattgttgaggtgggtagttaggataattttgtggtggatattgttgttgatattgttgaggtggataattttgttgttgatattgttgaggatattgttgaggtggatattgttgttgatattgatcaggatattgttgatattgttgatatggatcaggatattgttgataattttgaccataattattataattatttgaatcatcttggtttggaagtaaattaccaagttgttgatgagcaaattgtccagctgttgtattattaacactatgttcattaacaggtaaataaacacttgatgaaacactctgtctataattattatctgtttcatcatcatcatgttcttcatcgttattatgagcaccaggaatttgtaatatattcttgctttggttttgattttgaacttgttctagttgttcacgaggtaatggaggtaaaccaacagattcatcaggatattcattatcacttgattttggaattatattatcattgtgattttctgtattatcttcaatattattattattatttccataaactggtgcatcctttttaatatatttactaccattacgagaaaaataaacttgataaacagatttcattcgattcagttgttcttcctcttcgggtgaaagtggcatatcattaccaagatctgggatttctgaatttttagcatcaaaatcatttgcaatatttgaattgactgctaaaccaagtggattttgtactttagtattctctggtatttcattaacggtggttttagaagaatttataaaatttaattcaccatcatctgtaattggagatacagagttatctaatgatttatctaatttagattcaaaaggatttgatgttttttcaagttttgattctaaatcgttgtaaactatactactatcatcttcattttcatcttcagaatcgtcatctgagtcttcttctgagtcttcttcagaattatcatctgaatcatcatctgaattatcatcactatcatcatctgaactttcttcattattagcatcatcaccaacgacatgtaatggaggtggtatatttgatttttgttgaaaatttttatttgtaaaagattgattatcattattattataaccactattaatatttttcaatggagaatttgattttaaattattattattattattttgatttaaatttaaacttgaatttgaataagaatgagataatgaattacgtcttgaattttgatttgaattcatttttctaacgggataattaaattcatgataatctaaacctaaattttttgaatatctatctaattcttctttactactaccgaaaggtaaaaccagaggatcacttgaaggataagaaggatttgcaaaattattattattattaggtatattcttttcattaaaaggattaccaaatgaatcagtactaccattaactatattagtattaatatttggattataaattttatttgacatttcataatcaggtaaaattatattatcaacattaaaatctggatcatcatcatctaaagcttcctttttatttctacgataagctttatacataaatacaccaacgactaaaataactaaaacgacaggtataataacagctaaacaaattgctaaagtatttgttgtatcagtaccagtctgacacatttgttcactaccagtacatttttcctttctcttgaacagatgggtgatcattatgtgtggttggatgatcagtgaaagagtaagagcaagagtgaaaaaatcaataaagtttaatcctccaatcaccaaatcaaaatcaaaatcaaaatcactaatagatcaaaataaatgaaaatattgaaatctcaccagtttcagaaagtataaaaataaaaataaaatttaaaaataaaaataaaaataaaaataaaaataaaatttaaaaatatttctctctcttattctagccagtttatctaaacgcgtattaaagtattataataatctctattgttttacgcgtttattactgtttattacgtaatataagtataacttaccctcttttcaaaatcaaagaaaaccttcaatgaagtatcctctcaattttaatttaagatggctcatttcataattatttttattactctacattgtattaagttaattatgaaatgatattaattaaatattaatccccaaaaattagttaatataccattaatagagacaattgccggatggttctggtaaaaagcaagaaccatgtacgtagcaactgatctcctggcgttgtattaagaaagaaagtacaggaagttactctacttgaaaagtggaatagcatcttcttttatagtcaaatgaaaaaaaaaaaaaattgtttaatattaatatttcgcgaatcatatgattacgtcatatatttgtatgacactttatttgttgtgtttgagtacatgaatttccaaattattatagtaatgctattcgggtaaaagttatataaatttaactaacatttatagagagtaatataatatatacacataaaacactccaaattcactaaagatatgatatcgagtgatttatctgattattcaccatgtcaagtattaggatatgggaaattttcaactgttattaaagcaaaacgaaaacctgataatttattaattgcaataaagataatttcaaaatctaattcattcgcaaagataaataaaattttaccaatttcatcttcatctccaactaattatgataatgaaattgaaattataactaaattatcaatttataatcatcctaatattgttaaatgtttaaatattataatatcatcacttaatgtttatataattcaagaattatcaatttatggtgaattaaatccatcaattttcaaatattcaattaacaataatcatcaatcatcattatcatcatcaattgaatcaattataatacaaaatttaattcaaatcttatcatcaattgaatttttacattctttaaatataattcatagagatattaaaccttcaaattttttagttttccaaaatggtcaaataaaattaactgattttgatacttgttatatattaacaaataatcatcaattagataatgaacaattattttcaaaacttattggtactccattatttttacctcctgaattattatcatcatcaaatgatgaaaattcatcaaaaattaattcaaattcaaattcaaaatcaaagaaaatttcaattaaatcaaattggtcaaaagctattaaaatatttgataatattaataaaaatccatcaacttcacttattaatgatccatttaaattagatttatggtcattaggtgttactttatattatttattttattcaatttatccattttatgcagataatgaatttcaattacttcatcaaatagcaattaaagaacctttaattccatcaattgatgaattatcatttaaaattgatccaaaatgttcaatttttataataattaataatttattaataaaaaatcctcaatctagatggtcaattaataaaatttataaaactttacatattcaacaacaacctatatataaaccaacaaatcctccagttttaataaataaaacaacttcaaaagatatttcaatatctaatttatcatcaataattaataaatcatcaaagacgaaagcaacaaatactacgtctttactttcaccgaataatagtccagataatatacccacaacacaacaatttaaatttcaattaccaatttttatgtcaccacaaaatttatcaaaatcaaataattggataactaataatattttaacaaaaccaataattaatcaatcgactatttcattatctaaaaatgatgataaaaatgatgatacatcatggttaacaaaacctgaaataactgaagagaaaagatcatcagttcaaacgttacctgctaaattagaattaaaatcaaattcaggttcacaaaaattaaaacatagtgaaataatgaattttaaaaaatttatgaataaaaataataataaaattgatacgattaacaaaccaaaccacactcctttaagaaatgatgatgaatatcaaatacgaaaagattatagatcttatacgatggatgattatttagataagttgtaattttatttttaaaaaaaattgtataataatgtaatattaagaaacgaagaaataaagagaggaaaaaagaaataaagattaaagattaaattcattagtaaactaatttatcacctctataagcaaatgacattgaattaacattatctgaaatttctctaactgggaaatcacttaaatctgaaccataagttgcaacactatgagcaattaattgagtattaactaaaaatgcatcccatgcaatatttgttaaatcatcacataattgatgataacatctatctaaaacttccccattttctgcattattcttttctgcacctgttgcaataccaccagctggaataccattttcaataaatccaacataatcacttctaccatcaaatggaattaatgtatgatttaaaccctttgagttataaaaatcaatatataaatttttcaattcctctgaaccttttggattatcaatattatttgcatcataaacttcatattcataatttggtgatgccatcatatcataatccataaataatctaattttagaattttcttcaactgataagttctctgcataataatttgatcctaataaaccttcctcttcagctgcccaaaatgcaaatctaactttattttgaactttgaatttagttaattgagttgcaacttctaataatgaaattgtacctgaaccatcatcattaatacctggacctgcagtaactgaatcactatgagctcctaacataacaacattttcatcatcaccatgattagtttctgcaataacattaacggttgtaattggtccaacaaatgaatcaactaaaaccattgcattaataatttcaccattagataatttagatgcaattaaatcaccttcatctttactaattccaacacatggtgcaacatgaacaccttcaggtggtacacctaaagtacctctaatatcaccttgttcattattataaataataacggcagatgcaccaaatcttgcagctaattgagccttttcaccaaatggacataaacctcttttaatgaaagcaatattaccatgtaatccgatataatcttcttcattacaaccattatttgcaattaatgttaaattaccataaacaggttctttatttggagttgaaggtgacatatccatttcggttaaagatttaggaatttcatcattaattgttgcattaattttataaatttcagacataaaagctttaaaaggttgaactgaaatattataataaccatttaatttttttaattcatgtttaatataaccaattgtaccccaatgaccttttgaaccaataactctagttggatgaccataagatttatttgaaaattgagcaatttcatataatttttcagctcttgctaaaagtgccttttcagtgattaattcttgtaattcagttgtattaactaatggtaaatcttcaaaagattttgaattaatgtaatctagatttaaatttgattctaattcaacttcttcaacaaaattgaataaatccattgcagcttgtggtacaattgcaccggatactaaattagagagtattaataatgaagttaagtaattgaactgcattatgtaattagatagatagatagagtgtgataattataattagtataaatatatttaataaaacgagtgttaataataaaatgggacttttagatgtatgtagtgtatgtcaattgctaagttgagcaataattgttgcaaaagaaagagaaaccaaagaagagacaagggcaaacaagaaagaagaagtaaaaagaaggagaaaggcgactttataaggaaaccagcagagccgtcccaaactcaaaaaaaatttaaccttcctcagagaaaataaaaattaaaagatgccactatcggatctccgagggaaccgtagtaaccggggcaccgataagataagataagatgaggttattattattattattattattattattattattattattattatataagtgttttatagagagacacgggtgcaccagaaaatataagccaaagttaagttaagttaagtaaagtaaagagaaaaggagatagtaaaatagtagaataaaagataaagtgtaatatataaaacaatgtaactggtatatgataaaattataatgaaatacaagtggagaataagacatttaacacatgaaaaaaacaagaatttggtattgtattggatattagtacgtattgatataatcaatgacataatcaattagtaaaattaattggtggtaataatgaacttggtatggattgtgattgggtattgttagtaaaattattgttataattattaaagttattaagttattattatcatattctgataaaatatttaaaacttttgtatgaattcttttaccataatttgtaaattttaaatcaggtaataaaggtttaatcatttcagctaaaataaatttaattgaccaatttgaaatttctaaagcagtttgaacaacataattaccaaattgatctttaattaaaataattaaattttgaatatttaataaacttttcaaaattggatgtaaattaatttcattaaataaattatttggatttaatttaatacatttttcaacaacatttgaagaaaatttcccacaacttaaattaattaaatcatttgaaactaaatttaataaattaatattaaaattaattaaatttaatgaaattaaatattgaataacataattaccaaattgatcattcattaataaatttgaaattttcaaaatttcattacaaactaattgaatttggaaatttgaacatttaattaaaattttttgtaaaatacaacaaccatgtttatgagttgaaattttaaataaatttaaaataattaaatcaattaaaaaatttaaatcattattattataatgtgaaataattttttgaataacatgattaccattaatatcatgaattaaatcaacaataattggtttaattgcaaatgataataaattatgatgattaattgtatttaaacaaccaattaatttttgtaaagctcttgtaccatgtaaattagttgcaattgttttcaaattatttgaaatttccattaaaattaaagaaatttgatcatcattacaattaataattaatttttgaattaaataattaccaaatggatcaatcattaaattagttgaatttgtataaattgcattaaaaattattggtaaattataattaacatcattatcaattttcttttgtaacattctacaaccattttgatcttttgataaattaataatttcgaaaatttttcaaatttgctaaatcaataaatgatgataataaagtagatgatttatcattaatattattattattattattattattaatggatgatgaaggtaatggaattgaaattgagattgaatttgcagttgaagttgaagaatttgaagtaatttgaagtatttgaagtatttgagaaaagagtatttcttctagttgaagatcttgaattataattaagcagatgattatgaaattgattattattgttattggtattattaatatctaataataaagaatcattattaaaatcgattttattatcagggattgaaggtaatgaaaatctatttaaatttgaatttggatttgaatttgatgagaatgaattaattgaaccaggagatggtattaaaaatggagttgttgtattagagaatgatgaagttcttaaactagtattattattagtgttagcagtattattattattattagtattattaaaagaccaaagagatgatgaagaaggagttgaaggagtaatatctaaatcaattattgttggtaaattattatttaatttaaatgataagatactattattatcattatcattatcattaccgggagtatccggaatattataactataactataactataataattattattattattattataattaacaaaatctgacattgttataggattagaattagaattataattaggaatagaggtagaagtagatagtaaatgagatggaaagtccataataaaagagaggaagaagaggataagaagggagcaagaggaaagagaggaaaggggtataagaataaaagaaggaagaatagcaatcaattaaattaatttaagatacatcaatttaagataaatcaattaaatcaaataaatcaaataaataaagcctttacttaactataactattactaagagattcgtataaatataataaattgatttaaataattgatgtgatgagatcaatttatttctaaaaggggtgtttaattaaattttaattttaattttaattttaattttaattttaattttaattttaattttaattttaattttaattttacagtctagtaattagtctagatttattgtgattacgtaatggctgattaggtaattgattgtagtttgattatgtaatattttgtgtgattacgtaataatttatttttataggtcgctgcgtcgatttaatattttctttaattttataattaagataaaggaaaagcttagtttatagtagaggaattacctcacttcgatgatatatcctaatatcctactaatttatataggacagccacttaaatttagttattgttcatttttatctttatttttttctttaattttatctttctcttaattatctattgcacaatcatgtctgcccccttcattggcatttatactgcaatttatgattatactgctcaaaatgatgaagaattatcattaattgaaaatgatatactttatttaattgaaaaatctaattttgatgattggtggttagttaaaaagagagttttagatgctgatattgaagaacctcaaggtttagttccaaattcttatattaaaccttcaattccaatttcaaaatcaattgccctttatgattatactaatcaatcaattgaagaattatcatttaatgaaggtgatattttcaatgtttatgatatttcagatccaaattggactttagttgataaaaatggtaaagaatttggttttatacctgctaattatattgaaccttataatgaaaataataattctaataataataataataatacacctaacaatatatcattaactcaattcccaaatccttcatcatcaacaacaacaacaacaacaactaatgctattaatgctactagttcattcttacctccacctcaaagaattgatagacctagtcaatctaaatctgtagaaccttcatataatgaacctaatgatgaacctgaagaagaagaagaagctcctcctcaaatgccatctagaccttcaaataaatcttcaaatcctaacaccaattctaaaaattataatgataactatgatgataattataatgatgattataatgatgattataatgatgattataatgatgattataataattataataataataacgatccaactcctaaacaacgttcaagatcaaacaccacatcatcaagattatcaagtaaaaaatctttctcaaatttcttatcttcaaataaatctgaaaaagatgaaattaaaccaatttatggtgattttgcttggaaaattcatgaaattgatggtaaaaagaaacgttcaggtatcttggaaattggtaatggaaagatttatttagatattcgataaaaatttaaatgaatattggaaaattaatgatttaattaattataatgttgaaaaaaaacatgttttcttagattttaaaaatccaacttattcattcgaattacatgttggtacaaaagattcagctcaagcaattatatcaattttaggtgatttaaaaggtttacattcacaatctgcattatctgatattaaacaagctcaaagagaaggttatgaaaatggtattaaatctaattcatctgattcttcttcctcttataaaaaaggtataattctttatgattttgatggtgcagctgatgatgaattaacttgtaatgaaggtgatgaaatcttaattattaatgatcgtaaaagtaaagaatggtggatggttgaaaatttaagaggtaaaagaggtgtcgttccttcaaattatattaaattgatttcctcatcatcatcattcatcttcaaataatagaaaatcaagaaatactaatgatttttatagtattggtagtagtggtaataataataaagataattcaaataatggaggatttttgaaaaatttattaggttcaaataataataaaagtcctaaaaaagaaaagaaaagttctaaagatagagatcgtgaagaacgtgaattacgtgaacgttcaagaattcaattagaacgtgaagaattagagaaacaacgtcgtaaagttgaaatgaaagagagagaattaaaattacgtgatagagaacaacgtgataaattacgtcgtgctgatgaaagattacgtgaacgtcgtatgcgtgaagaagttaataataattcaaataatagtaataataataataaggaaaaagatttttcaaaaccaaatacatcattgtgtacgtacatggattgatagatcaggttcatttaaagttgaagcagaatttttaggtgttcaacaaggtaaaattcatttacataaaattaatggagttaaaattgctgttgcatgtaataaattatcaactgaagatttagaatatgttgaaaaaataactggtacttcattagataaatataaatcaaaatcaaacccttcatcatcaacaacagcaacaacaacaacaaatgtaacaacggcaactccaacaacagctacatctgaaattaaagaatcaacaccttctttaccatcaagggaaacttcatcagcaattgctcatcagaaagttggtccaagttggtttacgtgcagatttgattgattattggtttaatttctttgttgaatcaggtattgatgtttcagtctgtgatagatatgctagaaattttgctcaagaacaagttgataatacagttttagatggtgttacacctgcattaatgcgtacattaggtgttcgtgaaggtgatattttaaaaattaaaaagaaaattgattcaactttgggtattaataataataataataatattttaggtaaaaatatttcagatccattaccaaatccaccaactgaaaatattacagctcaaagtatatcatcaccaccaccacaaccatcatcatcacaaatgactggttcaattcaagatttattagatattaaaccaatgcaaccaactcaaacaggtattgcaccaattaaaccaataaatacaattggattatcaccagttacaagtccaactccacaatccaacccatcatcatcattaacaacaagcacctacaacatctgtacctacacaaaagacaggttcaatattaccatccagtgacaggtaatgttccaatgatggcaatgccaactgggtttatgccaattacaatggtaccaatgatgacaggtatgccaactggtatgatgacaagtatgccaactggtatgggattaatgcaaccattacgtacaggattaacaggtggattaatgaaatcatcaattacaggtaatggtaataatatgccaattacaacatttggagttaattcattaagtgcaaatcctcaacaaacaggtggtgcatttataatgccattaaatactggtggtatgccaaatacttcatttggaattaataatatgaatttgaataatactaatttagttaaattacaaccaactggtattacattacagaaaactggtaatggatttggtaatgttaataatagtatacctgcaatgcaaccaacaatgaaaacaggtggatttatgcctcaaagtacatttggtatgcaacttaataatgcaattactggcggtatgcctcaaaatacattcggtgttaatcctgctatgaactggtggtatgcctcaaaatacttttggaatgaaccctgcaatgactggtggtatgccacaaaatacttttggtatgaatcctgcaatgactggtggtatgccacaaaatacttttggctatgaacccagcaatgactggtggtatgcctcaaaatacttttggtatgaaccctgcactgcactggcggtatgccaccaaatacatttggtatgaatcctgcaatgactggtaggtatgcctcaaaatacctttggtgttaatcctgctttaactggtggtatgccaccaaatacatttggaatgaatccagccatgactggtggtatgccatcaaattcatttaatcaattacaaccacaacctactggatttggatttggtaattcaacaaattctaatactaacaataataccaatagacaagcaaatttagctaacgcaacagctgataatccatttggattttagaaataaaaattaagtaaaaagttattactctcttttatgtactttaaataaatctactctttattatatcaaatatttcaaacgttattttttaaaaaatgattaaaattttttttttcgatagtaaataaataatatacaaagaaattgatttacaaaaaatatagtggatgggggtgaaataaggaaatacaagttggtggatggtggataaatttttaattaattatctttatttgaaacatttgaagaattttcttcatatcttctacgttgttgagcagcaacatgtcttgcagctgctgctaaagcagcagaatcgaactaatgcatgatcatcatcttcaccttcaattgacattgcagccattgcggcaacatcagcaactgatggcatattaacatcatcatcatcatcatcatcgaatttatcatcatcaaatttatcatcatcaacaaatttatcatcatcaccaaatttatcaacaatattaacatccatattaacgacatcatctacattaatatcattatcattatcattatcaatttctgtattgttattgttattattattgttgttaattttttctgcattaattttatcaactgcttttaaatcatcatcaatttctacatcatctttattattattagtagtagtagtattagtattagtattagtattagtattagggatactattattattaatattttcatttaatttttctaatgatttatcagatttattaatttttgaatatttattagattttggagattttgatatttttgaagatgtagtattagattttaaagattttaatttttgtgatttatcatcaattttatcaatattaattttagaatctttttctttttccttattatcttccttaatattatcttctttatcttccttaactttattaatttctactccttgttcatcttgttgattattatttaatttataaattggtatacctgaatcatcatataatctatcaggtaaagaaccataaagccaaaataaacctttatttttagaaattctataattatctaaatcatttacgacattaataatattttttaaaattgaactatgatttctaaattcattttcaataaattcaataatttttttccttctttgagcagattttgcaattctaccacgacgccaacgagtaccaaattttttttctaataattttaatgctggtttacctttataaccattattccattctaaccaaatatctttaacagttttagcttgattatttaaatcaatatcaggaattctagtaccaggtataaaaggtaaaggaggaccattattaattgataatctaaaagatttattaatttttgaagattttaaattatttgaatgtataattgatgtattttctatatcagtatttgaggtagtagtactagtactattattattattattattattatcaaaagaatcaattaataaatcattattaatatcatttaaaggatcatgaattaattttttaacataatcatcgaaggagacaaattctgaatttaatttattaagataaaaggcataagatttaatataagaatttctttcatgaatttcaggtaataaagattgaataagtaagagggaatcagaaatattttcagttaaattttttaaatgatttgagaataaattttttgaatcattatttgatgagataagttttgattttataggagtagtgtcttgattttgatcatgaattggatcttgaatattattttcagttgatgatgtaattgaaactttgttattatcaatgttattattattattatcatttagattatgatcattattgttattattattaatattattattaatattattattaatattattattagtaacattaacagattgtaaatccggatctattttatcatcattattagtactggtattagtattagatacagaattaggatcagacattgttatttaaacaaagataaacaaataataaacaaataataaacaaaagatagaattaaagtcgacgctgaaaaagagggacgctctcttggttttaaagattttcttcaaattcaaagaaagtgtggatatcatgaaaatgaaaataataaaatcatcaggtctttgcgtctttgcgtctttgcgtctttgcgtcttttctaaataatcctctaataaataataaataaaataaaataaattaccacacactagtaacagtgcggcatttgaaaataaaataaataaaattaaaatcagctaaggtctcttaatattacttaatctaaccttatctattggtctatttatttatttaccagtcatgtattctcagcttatcttatagtcttatcgtattactcattttacttatctttattattattatgattattattataaatacttgtaaatttcccacaacgttctttttctctgctatccttctatgtttctttttatttttatttatatttttatttcattctaatcatctcactttttccctgctttattttttttttttggcttagtatcggtttatttcgtttattatctttattaatttcttatttcctatactctactataactaactaaatcaatcatgtctgatacaacttcaaatgatgtttggacaactgatttatcagctcaatatgatggagcttcaatggtttgggttatggtctctggtgcccttgtttggattatgatcccaggtgttggtttactttattctggtatgtcaagaaaaaaacatgccctttcctcttttatgggcttcacttatggcaatttgtcttatctctttccaatggtatttttgggggttctcattaacttttggtaatgctcattcaagatttattggttctttaggaatttttctgttttatgaatgttttaggtgaaaataatgctgctgcaactttacctgatatcgtatttgccttctttcaaggtatgtttgcaatgattactggttgtatcatgttaggtggtgcttgtgaaagagctagattaggtccaatgatggttttcctctttatttggattacaattgtttattgtccttgtgcaatgtggacttggaatgtaaatggttggttaaatcatttaggtgcttatgattttgctaggtggtggaccagttcatcaagcttcaggtgttggtgctttagcttatgctctttggtgtggtaaaagaagagatcctttaactaataaaggtattccaaaatatagacctcattctgttaccttctgttgtcttaggtactgtattcctttggtttggttggtttggttttaatggtggttcttctggtgatgcttctttaagaggtttttacgctaatgttaatactaatttagctgctgcctgtggtggtttaacttggatgttccttgattggtttagatgtggtcataaatggacaactattggtatgtgttcaggtgcagttgcaggtttagttggtattactccagctgcaggttttgttcctgtttattttgctgttccaattggttgtattactgctttatgttgtaattatgcctgttgatttaaaggatatattacatattgatgatggtatggatgttttcgcattacatggtgttggtggttttattggttcaattttaactggtttatttgcagcagattatgttgctgcatcagattatggtacagttattgatggtggttggttaaatcataattatagacaattaggtttacaattagctgcttgttgttcaattgatctttggtcatttgttgtaacttcaattatacttaatattatgaataaaatcccattccttaaaattagattatctgaagaagaagaagatttaggtactgatgcaactcaaattggtgaatttacttatcaagaatcaaatgtttatattccctgaacctgttagatcaaaggctgtccctcaaaaggccaataaggaagatattaattcagttcctttacctgatcaaacatcagaggaaaaacaagatgatgatactgtttaatctattaatcctttaatatatcaatttaactaacattcccttttttattaacattctttctacgttttataatcatttctataatataataatttaatcctttttacttcatactaccctcgttttaccataatggaaaaaaaattgtttaccttttatataatacacccttactaacactttctaatttcttaaataccttcctttaaaacaatgtcacattcacctgataatcttgtacaatataggaaacgattgcataatcttcttcatacttctaataattctaaaataaaatcatcttcatcaaattcaaatccttctcccaatgtaaggtttaagttacctatcaatgataataataataataatataccaatacaaaacacacttgaagtaattaaaccaaagataattaaattgaaaaataattataatgaacgaataaaagaatatgaaaaaattattattgataaagatgaaaaaatattacaattaaataattcaaatttaattaaatctgaaaaaattaataatttacaaaatcaattaattgaattaaataaattattaaaatcaaaggatgaaaaaataaataatttggagaatatgattattaaaatgcaacaaataattgaattacaggataataatttattaaatgatgattcaattgatgaaattaatgaaagaaatgaaaatcctgataataatagtaatagtaataattatagtaataataatatctatgaagatgattataatgacaattcaatcaacttaaatacacagcaactcatacaactagacctcaataatctatcctacctccccattaacaataaacctgatgatcttgatgatattaactcatatttattcgatatttagattattatgtatgtatatgattatgtaatcattgaaatattaaatagacggtaaccttcggacttcatgcataacatgattctttaagtatttctattctttttcttttgcatccttttaatcaagcatgtcgttagtacggtataattctaatataagtgatatatctaataatgaactagcaattgatcataatcaaaatattaataataacaatggttcaatgatagtttataaaaatagaaattctgaacaaatggttttatatgatccatttaagagagaatttcaaattgttaattcaattccaaataatgaagaagatgatgatgatggtaataatattaatgatgatattgaaaatgatgatgatgatgatgatgatgatgaatctaatataagacataagtttagatgtcatgtttgtggtgcatataatgaacctgatgaaataaataaagataagaaaccattaactataattccaaaatttaatgatgaaacttttattagtagagaatatttccatttattaaaagattatcaaaataataaaacaaatggtaaatttttaacaattggtaatgataataatgataatgataatgatgaaatttatcaatcaatacctgaaaaattaattaatcaaggatattttaataaatttttcaaaattttaaataaattaggtacaggatcatttggttcagtttataaagttgaacatcaattattaagtttaaatttaggtatatttgcattaaagaaaattccaattggtaatgatttaaaaaatttaaaaaaaattttaaatgaagttaaatttttatatgatattagttataatttttcaaataatcaaaataataaatcaatagaaaataataatgttgttaaatataatcatgtttggattgaaattgatcaaatttctaaattttcacctaaaattccagttgttttcttattatttgaatattgtgatggtggtacattagaggaatttgttgaaaatttaattaatccaaaattttcaattaatgatgaaaaattatggagaagattaaagaaagtaacaaattatagaagttcaagatatttaaataattttgaaatttttaaaattttcaatgatattactcaaggtttaaattatttacataatttgaaaatacttcatagagatttaaaaccttcgaattgtttatttaagacaaaatttaatgaaaattataataataatccaataattaatttaaatgatttaaataaaattccaacaatggttgtttcagattttggtgaatcaattatggttaatacaattgaagaaactaatggtaatagtaataatagcaataataataatagcccattttttaatataaatttagaaacaactggtaatactggtacattagaattttgtgcacctgaaataattaaacagcgtaaaaataggaagaaatatagtaatgaagaaaatttaccattggataaatatggaggatttagttattcaagtgatatttattcattaggtatgattttatattatttatgttttagtaaattaccatttaatgatgatgatatttcgaatcaaattttaaataatgaattatttagtaatttattaaatattagatcattaagtgaaaattttgaaaatcctgatattttattaattgattggattgaattaattaaattattagtatctaataatccaaatgatagaccagatacttttaaaatattgcaaattttgaatgaaatttatgaaaaattagattctaatgagattgaaaatgaatattaaaaatgaagtagatgaggaggaagaaatagaagtaaataaagatacaactattattgcaaattattcatcattgataatgttgactgggataatcttcaaccttttcatattaaataatattcacattaaacatatcacaattgattatctctcctatattcaatacattatccttggatggtatttaggaaatccatcatttacaataattaaaattgaatcattaattcttatattcaacttaattttatactctattagttatataatgcaatcttaacattgacaggatgttgaattgtatgagttttttttaaattttaaatcaattaagtttttagaattttcttcttcaattggatgaaacatttcatcatcaatattatcaattatatcttgaaataatttacttatattaatattctcctttgcacttgtttgtaagtatctctttatttctttatgattagatataaattcattaattatattaataaataaacattcttcaccttcattaattaaatcacatttattaccaactaatataatttcaataccaattaattgttcttcaatataattatttaattgatcgatccaatattctgcctttttaaaactatctaaattaattaaatcaaatacaattattgcacaatttgcatttctataatataatggagttaaattatgaaatctttcctgtccagctgtatcccaaatttgtaaattaattaaatctttattttcattaattggaattttctttgaaataaatgcagctccaattgttgatgatttatcttcattaaaagtattattttgtaatctttcaagtattgaagatttacctaactgatgattcacctaaaaggactattttatattcaacactacgtaatggtttattaggaagtgattgttgtgacattgtctaaagagaaagtgttttattgataaacaggggattgggtaatttattttatttttgacatgcctagtgcatacaaattataatacaggcttgagatataaaatagagtaagaattgaattgaattaattattataaatagagtgaatatatagtagtgtgtataataatatatagagttagtaaataaattatgattataaaagtatccgtagtaaagtaaagtattaatgaaaagtgaattaaattgaaaactgaaaaatgaaatataacctgtagaattgaaaagtatgataaaatgaaagcttaggggaaatgaatgatatataaaatgaacttttaatttttaattgagtgcataaccattactaatataattttgaattgatttatttttaataaaataattaatttcaggtatttcaatatctgatttaatatttgacatttgttggaaaatttttgaataattaaaatttaatttaatatcttttaaaatataatttttaaaattttctaaattaataaaacttgatgaacaaattttccataatttaaaatataaatcaattctatcattaattgaattaaaatttaataaaaatggtgaattaattgttgcatctcttaatgcaacccaatctgcatgagcaataaatttcataccatttgatgcattatttgataataattgtctaaatagggataaaattgaatttgaatctaaatcaactgatccacatgcctttaagcaacatctatagaaaacattagttttcataaaaggatttgaatttgcaacattaagtatatattcgaaaacttcagaattatgccaaatagttgattttgataataaaacattaataaaaggttcatcaattgatctaattaatgaataatcattaataattaattttaattcattaaatgattcattattaaaatttggatatttttggaaaaaaattgataaaaatgcatcatttaatgatgatgaaactgatgaatttgaactatttttcaattcataatgattccaagtaattaaccaaattttcttaattttttcaaaatcatttgtaatttcccaagaatttgaaatatattttttaataaaatttaattgtaaaggagtaagataaggcattgattcattaactgcattcatgaaaaaataatcagcagttttaatatctttgcaaaatccaataaaatgataaatgtgccattgtcatataagattttatattaattggaggttcaataccttttaaattaaatgaattataaacatctgaagttaattgtttaaaaatagttaaagcatcattatttttatttttgaaaagacaaactctaatcataccaatttgtaattcattatgtaatttttcattaatttttttatttaatttaatatttaaatacatttgccaaatttcatcaaaattaaaatcaccagattctactaaaaatgggaaaattgaacctaaaacaggttctgaagtaaataaattttttaaatgatttaaatttttaccagtttcccaaatatgaaccgcttcataagtgaagcctaaatctttataagctttgaaaagatgagttaaaccatgaggatttagataaattaaaccatctaataaattatatgaaacttctctaattgcacaagttaataaataatgaatatttttaattggattatttgaatctttatctaaatttttatttaattttgataattctaaacgatgaattcttaaaccatttcttaagagagaaacaaaatctgccattctcttttcattaagttgatttgaataaattaaagatctataaattggtataatttttttaattgctaaccaaaattgatttacaccaccacctgaaattttaccagttgctaaatcataagttgaattttgttttaaacattcatcaaataatgctaattgaatatgatctgtattattattggaaaaattatttaaattattaagattattatttgtaatataaggttgagtttgatgtaattcaaaaggttgagcatttataacagcagaagagaaaaattttgattttgaagtagtatttgtacttgtagttagtactagctacttgttgttgttagtagtattagtagtatttaatggagcatttgaagagaaataatttgattgagtttgagttgaaggttgaggttgagattgatgttgagtgaaagatttacttgattttgaggaaactctttgaccttgtttaagaccagttgaagcttgattagtgagtgatcttaacattgttttgattaaaagaagagatgataataggataagattaaaatcagaaatacaaaaacaggaaaatcacatcagtaatataatataatataatactgatacttatactatagtcataataacggggtgtacatgcccatagcaaatacgtaataaaattataataaatagagggggtataaatacttaatagtatactgtaatactaaatggccccactttgtattatatttataataaaatttaataaatgatcttatttaatatttaatagtaatgaatatttaattagtattacgtaataggcactttcctccgcttatttttttgattatgtaatgtgttgtatcgtatacttgatgttagtattgaatattattgtatcgtattgctgttgctattactatctataagtaattacagtagtaattgtagactgtttaatagatattttcattaaaatgttaattatgttaattatgatggcaaaatatttttgatatttacctgtttatagttgtattattgaacttaaataaacttgttacaataaataatcaataaaagcatctgataaagtaattactctaatttaccaatctctaacatatattattaatgcttcatcaattcaatatatcttcatatactgaactaaatgtaaattatttctgtttgattattctcaatctttttcatctaatttagatctaataagaactaaatttttcatatttgaatagcaaatatgtatctttaatatatctttttgttatcctaaactctggatcattcttattgcttttgtagcattgtttgttaaaaaatataattaacttgattattatatttgctttataagcatctttctttgttgatattaaaccaacaatattttttagatcaatttttatttctaattcttttagaattatttcaattcctttacagttgaaaaagacatgatgagtcccaccttccccttcgcagaattggcaagggtgataaaaatgggaattcaacattcctgtttgtaattcaaataattcattaaaatcaacatgcttacgtcagcagaacacctacaccagcaaataacccaacctttaaataagcaagaaaagcaccgtggcgcagtggaagcgcgcagggctcataaccctgatgtcgttggatcgaaaccaaccggtgctattattttttttattcttttaccattaccattactattactattattataattttttccaattgaggttgttgaaataatatcaattgttttgttttgaaattatattcatcttttctatttttaaatactttacatattatcctctctttactctattatactaatataaaatatataatcttcttaaatatcatcataatgaataatggtattaaagatagatcattattatcaaatatgttaattcaatttttatttgttatttcattatttaataatttatcaatttcaaatgctttctatttacctggtgtagctccaacttcttatcatgaaggtgataaagttgatttatttgttaatcatataactccttcattacgaaaacaagatgaaaattcaaaaacttatctctattcttatgattattattttgataaattccatttttgtcaaccaattgatggtaaacaaaaacaatctgaatctttaggttcaatcttatttggtgatagaatttttaattccccatttgattttaaattaggtgaaaattcaacttgtaatttattatgtgaatcaaattatcctcaaaatgatgcaaaatttgttaatgataatattagagctggtttccaatttaatatgttaattgatggtttaccatgtagcaagaactttaattgatagtaaaactgaagaaattttttatagttcaggttttaatatcggttatgatgatgataaaactaatcaaccttatttatataatcattatgattttttcattcaatatcatttaagatctgatggtaattatagaattgttggtgttacagttaatccaagatcaattaaatatgattcaattgataatttacaatgtaatgaagatattgataatccaattaatttatcaactgaagattcaactaatgttattttcacttattcagtttattgggttccttcaaatttaatttgggcaactagatgggatcaatatttacatgtctatgatccaaaaattcaatggtttgcattaactaatttctcattaattgtcattattttatcatttataatttctcatattttatttaaaaatttgaaaaatgatattcaaaaatataatgaagttaatttagatgatgatataattgatgaaatgggttggaaattaatttatggtgatgttttcagatctccttcaaatccaatgttattatcagttttattaggttcaggtattcaaattttattaatgtcaattgttacttgtgcattagctgcatttggtttattatcaccttcaaatagaggttcattagcaactgttatgtttatattatattcaatctttggttcaattggttcatattattcagctttcttttataaattttttcaaggtgaagattggaaaattaatatgttattatcaccaattttaataccaggtttaattttttcattattcattttaattaattttttcttaatatttgcaaattcttcaggtgctgtacctgcaggtacaatgcttgcaattgttttaatttggtttgcaattagtgtaccattatcatgtattggttcattattaggtttaaaaaagaaaaatattgaattacctgttaaagttaatcaaattattagacaaattccacctcaaccaaaatatatgaaaactccttacctttcattaattgcaggtattttcccatttggttcaattgcaattgaaatgtattttatctataattcactttggtttaatagaatttattatatgtttggatttttattcttttgtttcattttgatgttaattacatgtatgttagttacacttttattaatttatttttcattatgtaatgaaaattataaatggcaatggaaatcattctttgttagtggtggtatatcaatttatgttttcttacatgcaattattttatcaaaacttaatcttggtggtttaacttcaattgttttatatgttggttattcattcttaattgctgcttgtattggtttaatgtgtggtactgttggtttcttaagttcattatatttaactttacacatgtaccgtcaaataagggtagattaaattatataatatataatataagatagtgtatatattatattcataactgtattacaatacaataaaatacttttaaaacttataccaatgtccggtatcggttcagtgtataaagagtatcgatcttgtacaaaatttttcaggcggtgctcaacctccactttcccacaatttttttccatttccatcgttttaactcgacgaagtttccatcagaatggattgacttatttctcttttgaaattctctcctttaggtatccacccctttgtattattaacaaatgagtgaaacaaatacttctgagaatcttcctcttgaggaaagagtcgtcagtttgaaaattcagttaccaaatactgaagaaaaattagatattccttgttcaattaatgattcattatttgatataattgaaacacttaaattacttccttcaactcgtgaatttacttcatatatcttcaaaatttcaaatcaaagaattaatgatgaaactcctattgctgatttaattaaagatggtgaagattctgttactatttcactaattccatccccttataatgaaattactgctagaaaacatgttattgaaactagaaaaattgcattattagaaactgaatatgatacattcgaagaaattactggtgtctgtgctggtgcttctacttttgaagaattaaagttatctgataaacaagttgatgaagaatctgaatctactgaaggtgatgatgatgaatctgaacaaaaggatgtatcaattactgatgaagaaaaagaaattttatctaatatcgttaatgatattgtcaaaattgatgataatattgatattattgcagctaaaccaaatattaaaccatctcctgcattaaaatcattatttgtttctcaatggtctccagctaatctttctcaaaaattatcaggtgatttattctatttacaagctcaaactttagaaggtgaacatttatcaattactgctcatgttagcggtttcttcttgaatagttcaactaataacgttttcaatggttctattagtactttaaaggcaggtagagaaaattcaaattattcattaatctcacttttaaagtcaatctctccattatttgaaaaacaaatcaatattaataatgaatttgcttcaactcatattgctgatactttcattgttccaaattctaccactattacttctccatggttagttaaagaattaccaacaccaactccagatttaggtaaatctcaatttaatttattacatggtggtattgatggtgctgatttacaagttgattggaataataattatcaaatcattaaagatattccaaatgaaaattttgcacaaaaattcggtagagaaactaatttaatttcaactagtaccgattttaccgctgctgcaattaaaggtgcaatggctatcgttagaggtgaaattgatccagttaattctgaggaagatccagctttcaatatttatcatagaaatggtattttctactcaaaggcaattgattcaatctctcaattccaaaatactggtggtgatgaagctgctagagcttcagcttcaaaggatgttaattcaattaaattattaaataaatatgatattcccaggtgttcatactttattaactaccgtcgttgattatttaggccaaagaattctttgtcaagctcctgttccaggtattctctcagatgctccagtttctgaagattctgaaattcaacaaactgttaaatatggtttcattgatgatcactcagatgttgcatctaatgaagattatgttgaaaactttaaagcagttggtgaatgtttccatttaaaaccacataaaatctggaataatgatggttctaaagttgttgatgttgtcacttcaggttacactaaaggtactaaaggtactgatggtagaaaatatattattgatttatttagaagtactccattagatattgaatttattgaagcaaattatgatgtatcaaagaatgattcatatcctcatagagaaaccgttttaagacatgaagcaattgttgaatggattaagagagaaactgcacttgctgttaagaatgaaactgaaaaattagaaaaagaaggtaaaattgatactgagaataaaccaactattggtattgatgattcaattttcttattaaatcctgatgctttctcattatcaccagctccaactccagaattagctgctgaattaaagaaagacgaagataaggttagagaagtttctaaatttgttggtcaagttttagttccagaatttgttaaagaaatggaaaattctgaagtttataatgctatcgatggtgctcatttgactacccttcttcatcaatctggtattaatgttagatacttaggtgaaattgcaaaattagcagctgctagaaaaattgaatatttgaaggaacaagaagctaaatttggtgaagttcaaaaaattaatgaagaagttatcaaagctgaagaaaaagaacaagctgaaaagaaagcaagaattgaagctattattcaaaagagaaaagaagctgctgaaaagggtgaaccaattcctgatattaagaaagaacttgaagaagaagaaagattacaaaaggaaaaagaagctgcagaagctgaattaaccaccaaattgaacactatttcaacccctaacttattagattcattatacaagatttctattactgaaatggttgcaagagcaactaaacatttcttaagaaaagaaactgcttcaattccaattccacttgctccttatgttatcagtcatgttcacaattgtttgcttgcctcaactgttaacgctaaccctgaatctcctaaattaaatgaaactttaagttcaatttactcagatgttgacttatcaattttagaaaaagattcaaaatcagttattgagtcaattaccaaggaagtttatgttagatttagatacactttaccagaaaactggactgaatcagttaagatttttactctttggaaatcaattgctcttaaatttggtattcaatggaaaaagagagattatgcattcactaaagaagcacttgaatcacaaattgcaaattcatcaaccaagaaacatgatgataaacatccaggtaagaagaacaagaaatcagcttctgcaccagttcaagaaactgaaactttagttacaacaacttttactccagaagatattgtttgtgttgttccacttgttaaaaattcagtttacgaagcaacttcaattagcgatgcttgggataatggtatgatgaaattatcaagttcagaattagaagaacgtaaagaaggttctatttatgctaatcaatcagttcaattctgtgaaagactttatggtccagttcataatattactgcttcatactttactaaattaggtaacctttactcatcatctaaggacaactctggtgcactttacttattaaagaaagcatttttaatttttgaaagatgttcaggtattgattcttttcaatcatctcttgctttgaaccaattagctaatgcttacatagtaaatgatcaatttgttaatgcagttaagatttaccaaagattacttaaatattggattttagcatttgatgaataccatccaaatgttcttaacttatttgcatcagttggtattattttattgagattaaaattaaataaggaatcaattcaaatttttgaaaaggcaattgaattaagtgataaggcaaatactcaaaacagtcaacaatcagcatttttcagaaatcaattagcccaattatatttaggtgaaaagaaatatgaaaaggcttctgaagttgcagaacaatcattcaatgcttataaagttaccttaggtttgaaggataagtcaacaatcgatgcaagaagattttcacttggtttaaaggattacattcaacatcttaggactgaagctaaaagatctttagaaaaagaacaagaagctagaagacttgaacaacaacaaaatattaaagcaaagcaagttcaaaagagcaaacaaacctctccaaaccctgaaattgctgctaagagtattgaagatattgttgcgtttattgatggctcaagttctggcaaaaagaagaagaagaacaataagaagaagaactctaaaaaataatctagataatatttattagaaaattgaatttcagttataatgtttacgtttttatttatttatttatacagcttgtttatagttttcttttggtagttaattcaccaaaagttctcatgtatttaataaattatgaatcatttaaaacttcttttcactgaagtaattaattttattctgtataaaagtgtctatttaacgtttttatttataaaagattaaaaatcatcatcaccttcaacatcaccaaactcccaacaaccaatacgtgcagatttagcttcattttcaagtctagttgcttcttcaagttcccttttgagtaatagttcaaatggttttaagtttttcttcttaaccaaaccccaaccttcagaaatcatatctttattaatagtttgtgtaggattagtagcaataacttctggatcatataattcaacatcatactcaacacctggtagaggattttgataggtaacacatacaacaacttgtttatctaataatgtatcttctaagtagtaaattgcttctttgaaataatcttcttgattttttggtggcatatttattaaagaaagttgtgcaatatgtgcttgtggtttgtatacagaaactgaaaattcagcaggtaaagcacgaacatctgataacttaatagtttcaatggtaccataatctaaatgttgaaccttaacttctctatcagctctattgaaatcaagaacctttgctctataaaatttagaattctcctttagtttagcagcaacgtattcattacgtttaactgatgaaactgtagcaaactttggagaagctgcatgaaatttagccataaaagattttaatttttccttatctgaatcaataatctgaaatgcaattaaaccattagaaagaacttcacaaatttctgcattaagatattttctttcaattttcaggttttcagtttgattgactaatgattcagcagagttttcttcaactgatggatcataattttcccataaaccaattttcttagcttttgcatccgcttctgctttttgtaattgagctgcaaatttggtctcattgactgatctatcatgaagttcaaccaaaccttcattcagtaaagttacttggaatggaatatttgaagaaggaacaaaaatattaccaataaaaccaccaactttatcaacaccgtaaatttgaatattgacatctctttgatataattttttattagcaagagcagtagctaatttaaattctttactatctttattgtttgagtttgctaaaccacctaaaactaaaacaagtctaacgccttcttttggtaaaactattatgaatcttgtaccagaaatgacatgttccactacaccggagatagtatttctattttgaaaagtgaaaagataaggttttgatctttgtgcattctcggatgcatcaataagtttaccagtattacttggtttaccatggatacctttcttagcttttaatgccattgcttcagtttcaataagaccatcccaataatctggttttgcatcaccctttctgtgtctgataacacttgcataaccgtgagcaacaatatcttcattaatgttcttaccatctgaagttctaacagtgactaatgatctttcttcataattatcattagcttctctaataccttcaactgtaacatcaacgtgcttaccaataagtttatgtctagcatattccttagcatcagaaataaaaggtgatgtggtaggatcagattgtcttggagcctttaatgaaattaattgaacggtaacttcttcatcattctttaatcttaaaacaacagtatcagaggagatgactttggcaacagttgcagtgtatctttcaccaactgattttgatgaatcagatgaacctgaagataatgctgcttgttttttccaaatacgtttacctgcaagacgagcttccttttcttctttacgtaaagttgacattaatattgaaccaagtaaggatgattgccagtcactaacctcaactaaaccttcttgtaataatttttcagcaatatttccattaggatgaataatgttaccaactaaaacaccagttaaagattctccaataagttcaactttaacagatctcaataaaagtctgttctcaacaaattcctttgcttcatcaccatattcttcaccttgctcatcattacttgaacttcttggagatctgataccagaaataagaacaggaacaacactatgtttatgcttagttattaataatcttactaaaactctatcaccactcaaaactttttcaacaattgcatcgtaaggaattgatgtaatttctggtttaataacaagttcaactttagtaacatctggattccaaagaccaatttttgcagattcagcttccttttgaattgatctatatttttcaatatcttcatcatcatcgaatgaattgatgttgtctcttaatttagcaccaccttttgataaaacgtattcaatcaatgattggaatagtggagtggaaacatcaccaaattctctatctgaattgtttttgtataaaacccaaaatttgacttgtttaccaactaataaagttcttaaaatttctcttgcttcaaatgcatacttttcattagcttgaattcttggtgcttgtaaataagccaatgttaaaactctttcttgtttacctgattgagaggtaagaaccaacgtatcagcagataaaacacttttaacctttgcaaaaaagacttgagccattgtgtttacttgtcgtagaatttacaaaaacttgacaatgaacacgtatatcaatgtttccaaattccgaaggtctgcatgattcaacatcgatgattgaaattttgatcaattgatcgcgtagtaaggagaccgtccacagttatatgggaatcgattatgtaatgatctacattgcaaaattgcttctattaatctttggatgatattatacaatacaaatttacagaatatagctattaacatggttgtctacaatgtttccaactcattttcaatttggtagaaaagtcctttaggattttctaaccattttgtgtttgcttcattaagaggatctctggaaagttcatcctttaacctccatataatgatttgggcttgtattggttgttctttcaaattgatttcctctgctgataaaattaaccaaagttgaacttttctatatctcgtactccctagattctctaaatttggattcagtacatttaatttaaacaaattttcttcttcgtaatatggattgcttatattttgaacatttgaatgagtgtcaccaaaagagtaaaacgtatacgcaactctctgcataagaaagctagtagataaagagtccattagttgtgaagtctattatttttttaaaatgatcgattgattcgttaaaatacagtgtcgtgtctgttggttgtatcattaatttagtcttttgacctaatagtaagtaaagttcagctgttaaaataacaaaacgtagtgcataacttttcaagttgcttctcgataggaaagagtaaaaagatgaatttatcatgggatttatcatactggatatcattttcaacgttatttgaggaatttctggaactcccgtagctcctaaaatcaatgaaaatataatatattgttgtaatgatgcaatatgagtattcgctttatcatttatcatatccttcttaacaagttcgtaagtggtgtatgcatttttataatcacctaacatgaaataccaatcacctaattttcttatcatcatttcaggactatttgctagataatatccaccggataaattatatgaaacaatttcatttgcttttccggtttgtccattattcgattgattagaaccaaatgaaaaaaatgaaggtttactatttgacccccatttacgtccaccaaacagtctacccgttaaactcgttcgaggttgaataaattcttcattccattttttcatcttttcatccatgaaaagaattaaatctttcaatacgatctctgaaagtatacccttccatatatcatacgtagttttactaatcttgagaatagaattgttctcataatctttattatcttcgtttatattctgtacaaacagagaagaaatcaattctattctatcaacgttatcaccattattattcaataattcaatatcaatcgttataatattacttttcttacctctttttatcttcaaatcttcttgtattctaagagcattttggagcatttcattatcatttttatttactataatgatgaattgttgtaaagttgaagatttatcataccatgcaggatactttttgttttcaaatgatcgatattaaatctttgacagcaacatctgaatcattcccacttattacagccaattgcatgaattggatgattgaaacattcaaaagatgacaatatctcagatgaactcagcatggttagcattttcaaataaatactgttttctaaatttgaaatggagtgaacatctttacgataagaattataatctaacggagaatcattacagcaatcgtatatgattatcaatttttctcacatagtcttttaaatctttagtatatacatcaagattaaacagttcatctgatgaattgagtttgtcatcaatgaagtttattgtatcaccaacaaatttaacacacccaggatgtggtgatatttgcaattgaattggacggtatcggattagacacaaaacttccattatatgattcaccatatgctaatgaattttcaaaataagtgaatagttggtgtatattatctatatcttctgaatgttgtttggctattcgatcagcagattctgtactcactatagaaattttaggtgaatatgattgttttattatttgtgatgtagctgaagtggtacacccaaacgtgcttaatcttgatatctgagctttccccaagcttaccaaagagtctagggatattcagatccatatttataactgagagaggattgttatcaaaggaaaagtaaatctaaaatgcaagaggtttgatcattaaacaacgtctgaaatgttgatctctttatgagattacgtaagtttttcataaatttagacttagtacaagagtatgatcaatggaagaaattacaattgatattgcatagtttataaaagtacacagtaaaatacaaaattaaagaattaaagctagaagtgaaagataaaacgtaaaaagagatttttgaaaaatgttaataggaaacctaaacggaacctgtatttataatattagatggtggaacaacatcctgtaaacgatcctctccggtaagtttcaaaccatccagagattcatcacccttaccacccaagaatgaatataagaaacctagtgctgttaataataatagagtaccaatagccaatgccaatccaacaccagcgacttgtccattagtgaaatctaatgatctggtatcttcatcaggagttgaagtggaagatgatgtagaggaagaggaggaagaagaagaacttgatgatgatgttgctgtttctgtaaatgatccctggtataaaaacattgatgtcatacggacaattgactttcctttttcattattagaactcatattttgtgaagatgtaagagtatatggaatccattgtgtaccattccaaaaagcacttgagacaataccatagttttcagtagaaatatcaccagttaataacaaagcttgtccattatagaaactatcagttgcagatttaaccagggaaatacctgaaaatgacgagttttgtaaattcaaatcatctccaagtgaattccatctagagtcattaaaatacccaatataatcattacccatgacaacgattgtatcgttgagacttttgctgttttctgtttcatttccaaaaataaaagttttgacaggtcctgataattgcgagttaaaattatctaacattgatatactattgttaaaagtatcataaatacccatataaccatgttgatctccactactaaaattacctgcaactaaaacacgatattcattataataattcaaagctgaaatggaaccggataaatctgaaattgttttattaattgttaaattgtcagtatcattattgaacgtacagagtacattacaatcaccgacagagaaatcaccaccagtaattatgttaccatattgaggattgaacagccaaagcattgatggagccactaaatgtttcattcaatgttttgatggaagctgtgattcatattatagaatgccaatccattgatttgatcagaattgttaacttgatttaccattaactgaaaaaatcaaagtgttcttatagtataaaagagattcaactgaatgatccataatcaaagttcaagttttctgataataaattgattgaatcatcattaatcaggaaaacattactaccaccaacagcaactgtattatcattaatataagcaccagtgttaaatgtttcattattagaagtaaatgattttaaaacaccattatcaattccaacaatattgtttgatgatgtattatactttttaatagatccaatgacatatgaatcttcattatcattaaataacatccagtttttatcatttgaatcaagtgaggataaaatattcatttcgaatgcagatgtgttcaaaaatgtttcatcctgtgtaaaatcaaataattgtgatgttgaatcgttttgattgaaaacaaggtattcagtttgattgaaataaaatccggaaatttcattaataggcatcagtattggatatattaagtgtttcaatactattagttagcactattatataaagcagaaccatcgattattgaattagttgtatcgtttttgaattggattaaatgaagccaatccataacaaactcatcagtaggtccatatagaagagaaacttctttaccatcagtaccaccttctatagagtaaaaatctgttgctaataaagttgaatgattagtttcaatttctgcacctaaaagagatgaaccataaattgattcaaaatcccctgcaaatattattgatgaatcattataaataatttgattgattattgcattttgatccaataatgagccaattaaattaatactagtattaccaattggatattcaattgatgaatcagtgaaatttgatggattatattcaaaaataccattaagtttaacttcaccatgtttttcaacagttaccctatttgtaatattacctgtaatttcattaacattaagttgaatatattgtaattctattgaatcagcaacaaaatggattggtgaatgttgtgattgatttaataatgtcatttgaattgagactggtttattatctttattaagattcaaatcacctgtatataaaacatcatatttttcataatcattagtttgataaataagtttatttgccaacagttgatcttcaccattatagacaggtaacattaacgatacctctattagcacatgaattatcttcaagacatccacttgtatacattaagattgaatattcaccagaaacgggtagattaacagtatattcaataccttcatcagaagtaatatcatttgtatcaacatcagcaaaaagataattaccaaaactacttgattgccaattgatattatcacctaaagtatttgaatttacatcaatatcatattgatttgtatttacacatttttcaagatgattaagtgtattatttgcataaacattaataccacgacttgataactcaataccttgtaaagcagcataatcaccataataatccattatttgaacagtgaaagaattaacaccaattgaatcaacaaatgcaaaatcttgatatgtattagtcaattgcaaaacagtttgattattatcagtaaatgtataatattgattatttgtaacattattatttgataatgccgaggataaattttcctttaaatataagggacagaaagcatcacaatatttaattgataaatcagatggatcaatataagacatattcataataccatttgcaggatatgttataactctaaaagatttaacaccatcattacttgaatctgcattatataatctaatctttgaaggatttatttcatcatttaaagcagctgaccaagaaccaatttcattatttggtaagatccaagcatttgataaatcatcttgtggacaaataatattttgataattttcaccatcagttgcagacacctgtgatgaagaaattaaaattttctgtgataaatcaattaaacttgaagtatttctgtaaaatgtattttttgttattgtttcattataagtaatatttaatagatttgaataaccaatattatcaaacataccaccaaatattattgaatctgattgatcatatttgaaaattgtatttattatggaattttcttcaaatccaccaaatggtaatgaaaatattttactttgtgaataatcatattgaacaataccatatgtattattaaatgataaagaaccaccaaaatatataatatctgatgattcatcatagtagattgattcaatttcaccattaatatcagtccaatttgataactctgtaacagttgaagtagttagtgataaaatataaggtttattatcaataatcattaaagaattagagtcatttaaaggatgccatattgatggaggattagttatattaagtgttggtaataattgaattgaatcatttgttgaagataactgataaaggtttaaatcatttggaggtgatgataaattataagtattttcattaaataacgatatagcatcaaaatttcctaaaagtaagatactttcatcaatgactggagtatcaattgctgaagtgaatgatacttgtgatactaaatagtataatagtttcttcggtaacatgcttttcttttcttatgaatttgaacgtctctatttgaaataaaaatcaatgattaacggaacggaaagaaaaggaaaagaaagaaagtatacctaagaaaaacttggaagaagcaaggaaagaagcaatagttggttgaaatagataatcaatgacagaacaggtataattgttaggtgaaatatagttatatatggtcagtacagaatactgatctacccagatatattatcattcacagatcaccaatcgtctatcttatgaaaaaaaaaacattgaatttaatgtaaccagccaccgcgtccttctttgtttacctttggttacgtaatgagtctgcgccacatgtataaatgcatagaagcaccgccacagagataataaagtttttcaaaatttttttaaattctccgatgatgattacactacatcgattaataataatgcaaaatcattttacttttttatagatcgatcggtttatcataaagaacctgtctctttatggtacatggatgtcacaagatttggaattatatgatgaggaattattaacagagtgggatgtagtacaatgcatttatcctgaattgatagtaaatagagaagatagggaatgtagtattaaaattccggtatttttagattcaccaattgttttaaaatttcatgatcataataaaataaaagagaagattgaacatttaccaccaattgaatgtaaatttaatttccctaaaagttatccaactgatgatccacctattataacattgagtaatactgatagttggttaaatgagaatgatattgaaaaaattcaagatgaaatgagaaatttatggtcggaattacgaagtccagttattttcacaattattgattatttgaaaactaattcacaaataggttttaataaatttaataatagcaataatagcaatgaattaattgttgataatgaagttgaatttcagtattttattaatgaaaatgaacttgctaaaattgaaattttcaataatttgacatttttatgtgatatttgtcaaaatgaagaaaaaggtgttaactcaactcaatttccagattgtaatcatattttttgtaataaatgtttaaaagattatttcacacatattattcaaagaggtgaaattgaaaatattcattgtccatcatttcagtgtactaaaaagaggaaagaatttattaataaattattcaaagatgcagaaattggtggtaaagagtttaatataaataactttgaaattgaatttttcaaattaccagttaatatacaacttttggaaaggtttttagatgataataaagatgaattaattaaaaggtatcaaacattacattttagaaattctattaacaattttcgaagatttttccccaatagagttactgaatgtccaagaagtttatgtggtacaacatttataaagcaagatgttgaatctaatttaactatttgtccatcatgtaaatttgcattttgttgtgaatgtttccattcttggcatggtaaaattaattcatgttcaatgtataaaatgaatttaccaattgaaataatggaaaaatggattgaaaataatggtgattatccatcaaaacagaatatggaacaacgtgaaatttgttcaaatatttcatttaaatatggtaaaagaattgttgaattagctgtaagtgattatatagcacaaaaacaatttgatgaattaattaaatcagaagattcaggtattgttaaatgcccaagttgttcaacattcatacaaaaatcagatggttgtaataaaatgacatgttctaaatgtttagttttcttttgtatcctttgtggtgatagattagataggaatgatccttatgaacattataataatccattaaatccatgttttggtaaattatttctaggtttattgattaatgaagaggaaaatgggtaatatatatacattctatagtatgtgtaagatatatttaacatcatcgataaaacaaaatcatcaatcttattcaaaagaaaaaatacaccctgtatatttttcataaatttttttcccaaggtcaacaatataaccttcaaggtgtttaaccttaaattcctttaaagtatacatcattcggagtaataatagtaatgtagtgtattataatatgtattttattatttgctatcatatacaacaaaacagaagaatatagcaaaattatccaaaacaaaaataaaagagctgctatccatgaatttttttcaaagttaccgtgtaaggaacaaccattgagtggaaatattaatgttattagaatagcaattgtgtttcaattattaccacactcatttactgaaaccctattacttattgctaccattttaaaaacacattatttcaaacatgaatgaaagaaaagcaaagtataaaacaagattcaagtgactttgaaacaatcgtaaagtttcactgcatttaacccagaggtaagataatttcccgattaaacaaatatttttttaaatatgtcaaaaatatgcccctttaccaaactttaatcagttaaagataagataatgcatgtaaaatgatatattataaggtggaaactattatatccgataaataatgaccccttttacatgattggtttagttgttatattttatggaatatattagagatattgcaagtgacatacaatttgactttgaaagggagagcaatgtaaccggaggggatgagagagaagagacagagagagatcggggaactccgaggattcaaaaacattactttgaaattcagattcttttcctaaattcttattattagtttctaaagatcttaaacttgttcctcataaagaaggctatatacgacggttttacactcagattctgggatagccgggtgtatatcattttcacttttttttttcacattttttaattttttcaattttttaatttttagactttttaatttttaactttgttcaaggtttgcctttcttttagtttattgtgatttgagtttgatgtttctaaaattccagtattgttacattatttaatttctaatttcagacatatatgctcattattggctcatgatgtctaatggatcaattgataatgaactgattgataagattaatacattagataaattatttagttatttaatcactgtgatgaggaaaaatgaaatacagcgaactgtcttgtatatggggaaatttgagaaaaataacttggcggctgatgttaataatcttactgacggatcaataacagataatgttaatgattatgatgttaaccaatcagtggattctcaattgaataataataataataataataataataataataataataataataataataataataatagtaatggtaacagtaacagtaatagtaatagtaataatgttaatgatattgactctttatcattaagaaaaatttcaaataattttcaagagctatcaacaagaataagtaaatttattaatattttcaatgaaatttcacgaatagttaattgggaatctgatgagaaaacattatgtgtattattattatatacctggggatgtatttatcagcatctttggttagtttattcattaatctatttaaattataaattatcaatgaattatattaaaaagcatccaataattgaaaaaccaagtaatgcaacaaataatttattatttgaaaaatattgggatgaaggacttggaactcgattaaaatatacaaaatctgaaaattacaatactgatttcatttttggatttttaattcctgaagagaatgatattcatgccaagaaatttagtgctagtagaaatatcacacaatataaccaaagtaaagacttatcaacagctgaaagatatattgagatagtatcatcgtatttggagtttgataaggatggtgaaattaaacttaagcaacgagagttagatgaatcaaacataaatgattttgaaaacataagcaagtttattgaaactaaaagaaattcaaccatacataaaacaactaaagacgaatcaaactccaattccaattctagttccaattataataattttatactgaagaacttatttgaaattcaattacagagcaataaattattaaatcttatcaatagcactgaaaagttttacactattcattttaattttgataatgaaaagagttcaacaatattattatacaaaatatcaacaatttgtattatattattttgtttaggttcatatattccttggaaagtaatatttatattagggatatggattggaatgttaattaatcacccttatagaaagatcataatgaaagatttgatgaatatgattgaagatataaaaaatggtagcaaaaacagcgtaaagaaagaaaacaaagttgatggaaagcaggaaaagcgtactaatttccgggataatattataattgatgaacccgcttttatcagagaagttgaaatctttgaaattagtaaacagaatgtactaaatttagatgaatatgaattctatggatttagtacaagtattttcaatttaagtgatgaaatacgaatgaaaagaaggaaaccaaatttagtttacgatttaaatgaagtgttagcaccgaatttatttgaattaataactaatggaactagaaatactagtaatagtaacaatattaataataacattaacaataatgttaatgatgatataaatgatgataatgtaatggaagataacaataatattaggctatcattaaatatgggtgttgaaattaacaataaaacggcgagagataatgttatggctactgaaaaggataacaataataataatcataacattaataatattaatactattaagaataacgagataaaaaagtgggattttataaatggggaacaatgggaaattaataaagatacgcaatgggtttatgattatggatatgattatgaaatgtttattaaagataatgaaaatgaaggatggatttacgatattacagggcagtttagacgacgtagatacaccagaaatgttaaattatattaatctaatgataataatgataatgataataatatcttctacaaataaatatcatcagacataaataaaagtctaatataaataattgtttaaattaaatatacttaatcggagtccttttatgtccttagaattaaacaaaagaggcactaaccaaaattagatcagtttcctatttgggaagaatgtggcaatttaaattaaaattgcgggtggtacaaaagaaagaaaaactgtaaaaaactgtagaaaacactaatcaaaggaactatattaaaagatttacaaattacctttcgaagaaaggtaaaatttgccgatggttagtgttagagctacaaaatttaacccgaagggaaagtatattataataataaaaattttatattttagtcaatttacatatttttttaattcaacgtacatttagcgaatctataaagtttatggtttatataggaagttaagagatgaatgtaaagtatattaatatatcaagacaatgtagatcaattgattaagaaataaaacagttgaattaatgcaatgaaattattatcataataataataataataataataataaaatgcccctgtgccccagatctagatcaaagtacattttttaacatccaatattactgcatgtggtattcgtagatttggggcaaatataataaaaatttgaaaggtattaaataattttcaataggaaaaaaagccgcaatgtgcatagataagcaaaattgccctttttctattgtatagcgatgagcattggaagtatgataataataataataataataataataatagtaatattaagtaaatttaagtaaatttaatgttaatgccccaaatagatgaaacatagtttcataattctaaaactttctattttatatcatgattttgctcaatcataaattttatttaaagtctcagacatcagcactgtttcaactcctgtttcatcttcatctgatctcgtttcatcttgttttgtatctatttaatagcttttgctattattttttcatcttgttttctctaatttattcaaataaacctatctttattagctattaattattatagctttctattaaagacaaaggcaaaaaaaaaaaagaagttaaaaagctaccttttttctgtatttaaatcacacatcaataagcattcatataccctttcgtttgcttatcttgatatttttttttttttgaaatatcatttaatattcaagatgaataatcatttgaaaaatagcctattggaaaatagtccaaaatcattaaataataatactgttaatatcccaacaatacctccattgataagttcaaattcaactattggagctataaattttcaaaatattaatcaaaatattattcaaaaagatattaataaaaatgatcagttatctcctcttatgcctcaacctgttaatgcaaatcaattcaatatttatgcattacaagcaacatcttcatgttcttcactcagttcatccaattattgtgttaccccaaattcttcttacttgagtcactcaagttctttcccttcatcttcatcaaatcatttaaatgattctttacaatcacctatacatgattttaattgggctaattataatggatttgctaacaacaacaataataacaatataccaacaattcatcaaaattttgctccttctccaacaaatatttctgcttcaatatcaaataattattttaatcaatataatcattatcttagtaaacctactggtttaggtataactaaatttccaaactcaaataataattcaaaaatttcaaaatcatcatcaaaatcatcatcgaaatcatcatcgaaatcatcatcgaaatcaacatcgaaatcaacattaaaatctagatctaaatcccaatccaaatcccaacctaaaccaaaatccaaagatttatcattatcaattccaagatcaatatcaatcttaaacttcccaaaatctgatgtatcttcatcatctctatcatcacttttaacaccatcattatcattaacatcaactccaaatttaataccaaattcaaattcatcatcttcaaatccttcattatccgcaaatgctttacatttacttaattcttcctctaattctttaactaataagaggaagagaaagaaacattctgaaattgaaagacattatgcttgtacttttaataattgtactaaagcttatggaacattaaatcatttaaatactcatattatgattcataaacatggtccaaagaaatcccctgatgaattcattgaattaagaaaaaaaataagaattagaaagaaaaacaattcaataacaatgaaaaatttaaaattaaattcttcttcaataaatactattgattcaatttcaaatgataatattaatcttaatattaaaaatactaaatctttatcaatttcatcaatttcatcaaattcatcaattaaaacaccaccaaattttgaacctgaaacatcattgaaaaatattcaaattcaagttccttcaataatgtcattgaaatcttactctttactaccaagttcatctcaacctttaaattatgataataattataatttatcaaacaatattaacaatgtcagtatttacgacgattcatcatatttaagttatccaaaatatccttgttataattcattgtctaattttgcagattattcaagagctaatttaatgaaattatctcaatcaaattgcgattagatcacactaagttgcatatattcgttcttttctttattcaaattgtttttaattattagttttctacgttttccaatttttcgccatttttgatttgtcgtttgtgtgtcgtgtgtatgtgtgtcttgctttcctatttaattcaaattaatttacttcttatacatgcaccgtaattatatctttattttttatctctttacttttcttgaattttatttattctatataacaaattatgtacatcattccaatctaaatcattacttttccaaataaataattatatcaaaatatcacgttttgggaaacacttcacttcgttgtttttttgttgaaatgttgggaaatatgaattgtttggagcactaattacaggtaaataaaattgttttattttacccattaatttattggcttttacatttaaaggtaagttcattatatttgtaatttctcttttaccacctgaattactaacaatcgatgttttttcaccattgaaaatctcaacattataaggttttgaagattttaagaaaactctattatcgaaaacaaatttcacctatcgaattataactctcatatttttcttgaaatcttcttggaggttctctataaatggttaatttaatatttgaatcttcttgtttccattttattaaacaaccagaaatattaacaatacctttcttaacacgtaaaacatcttctgtaaaactatgtgattttgaatttggtataattaccgagtttttagaatcaaatgtagtaaacctataatgatatttaatttgtggactaactctccaaatcttattaaatatccaacgatctagaataatgtaatctgtaacatttagtaatgatttatccttgatatttatatcaatgtttaatgataataaagatatattgaaatcacacgaagcagatatattataattgactaccatatcattgtctaactctttcattggtttataaatgattttctccattgccttaacaatgtgattgatgtaattgtattatatcattttcttttattattccagtttcaatcgcatttctaagttgatttcgttgtgttaatgatgtatccttattagtatgatcttcaaaccatattaaatcattttgtgtagcatatgcgtatatttcatccttctttatattcaacattggtctaatgagatcaatttgatgtgaattatataaatttgatggagtttctaatttcatacccattaaaccaaataatgtagaattagattttaaccttaacaaaaaagtttcaatttgatcatttaaatgatgtcccatgtataattcattaatattttcatctttacaatattgaaacattaatttatatcttagttctctagcatgtttctctacttgataaggattaatttgttcattaattttcaatattttatgcgttattggatatttatttctttgatgaataactttttgaatattaattgcttctgtagaactttcacttcgtaatccatgatcaatagtaattgcatgaatatcaagattggaaaaatgttgttttcgtaatctaactaataaatcaagcattaccatggaatcaacaccacctgataatgcaatacctattttcttaccattattatacgatccatatgttttcaatcgttgtatgttttgtagaaacctatcaattatcattgttaaaaaaacctgtaaatggatcaatttccaaaactgttttagtatggtaatgattttttttgtttacctcatcatcaacatgtgtttttaacttgtttgtcttttcttttaaaaataggactacccagtgttgaatattccattgatgtccaaacaggatgatattatcaaacaaatgaatatagagctagaaactttacaaaaaaatatagaacaactttcaaatttgactaaggaatcagcaactcaatttcaaacaattaaaaagtttggaattcaacaatcaagtttctttatgagtgcacataatgttttccaacagatgaatgacgagagagaacataatagtaaataaaaatcataatacccattaaatcattgttatagataattaaataagtaactaactaaataaaaaaaaatatatatcatcattatgtaacataaacttcataatttaatcttttaattcaccggattcaacgaccttaatttcagcctttggcttaccggatggggaaccgtaactttcaacagtctttaaagtatcaagaccttcagtaatttcaccaaagacaacgtggtgaccatctaaccaaggacatggaacagttgtaatgaagaattgagaaccattagtgtttggacctgcattagccattgataattgacctggtttggtgtgtttaatttcaaaattttcatcttcgaatttattaccgtagatggatttaccaccataaccattatgatgagtaatatcaccaccttgagccataaaacctggaataactctgtggaaaatagagtctttaaaaccaaaacccttttcaccagtacataaagctctgaagttttctgcagtttttggaacggttttatcgaaaagttcaaagacaattcttggttgctttgagttgttaatagttaaatcaaagtaaacttttgataattgtgcacttgaggtggagaaatttcttctaactgtgttaaacattgctctaatatattggttgtataaataatatatttatattattaaaaaagattctataaaaaaaaggttaagatttaaatttcaaaagtgaaagctgttaattattaatttcaatgttggaaaaactgtcataattttgcaaaaatagtggaggtgagaccgaaatttccgaattggctaagctaaatttccgagacgtgtatattctgattaggacaatgttaatgctattctattaatggtatcatctaatgatattaagttgagttcaaatagttcaaagtttccagaagtgagtgcttcaattagaccaggtagaatatccactcttgatgaattagaatcgaaatcagaactgtgtaaacttggtgcaaaaattaaatgtctgtaccatggcctaataactgataaactttgctctgtatctttgaatactgtaacaaacatcttatccaatgatttgatcttggaattatacattttaattttgatagctgttttgatcttgtttaacagtttaaaccagggataatcttgaataatttcttcttgtaatgatttcatttctttatcaaaaatcttagtaagttctaatacattttgaactgtgttatttaactttttcatttcgtcttcaagtttttgataatcaaatgggtatttcattggcttttcaagccattcttttgggactctatcatataacttatttaaagaggttgatatgacctgaagataatcattcgtagaaacattaattatttcatgttcactaagttcaataactaacattccaataaactgtgataataaattatgtaatttcaaatctggatcaaaacttttcaacaattcaagattatcaaaattagaattataatatgaaacaggatcagtattttcatcttgtttaaaaccaatattaatggaaggaattccaagatggttttggaaaatagtataatcattgacttcttcacttatcatatcaatcgtattattattatattcaaaattatcaagtaaactttcattattgttgattaatattaaatccataacttttttcaaaacattgttaaataatggattagagttaattgataatttattccctctgatattatcaaaattaatatacacaaaacagttattaatcaatctctgtgcataatattcaccatattcggttgatcctaactgtccatgatttgaaccgtcccatgaaattaatttgatagtcctcaaaggtttccaatttagtttggctaattcattgaatcctctagcaatttcaaataatccaacttctccattacttaatccacctaatccactaattacatcccttgatgtacctataataatttcttcatcggttataataccgggtatttccattataatattataaattggtttaacaccgtaatcaatttcgttaattaatttaattcgcataatcaacacttggacctggggtatacttaaaattttccaaatttcctacccaatttaaatttggtcccaaaccattaagtttagttagcaatggttcaatttctgtaaagctaattggtaaaatgggtatatttggtatagttttcggatttttcaatcttttatgatcttggaaaagatatggtgaccaaccaggtgttgttggatcaccgggttgataataaatataatttgaagtgaatttatcaacttcatgatgatttcttgaatatcctagagggaaattcatatatccattcttttctgtgaatttcccatcatcaaatggatcattatatattataataccaattgcaccatttttaatggcattttcaacaattaaacttaaatgggtatctttgttgtaacgaatgatgaaaatgttattttcaattttaatattgttttcctttaaagtattataatcatcaattgttccgtaattaacataaacgtaattaccttcaattgtaccacttttactatatggaatatatgatactgtatccgattcttttaaattaggttcaaatattattttctttgtcttctcattaaataattgaattctagtatcaattggggtgcccatataaacttcatatttttccgtatttatacccaaatattcaaatgtttctgcataattttctataaatttatgatttttgcccgtgaaatgagtattttcattataatgcagtaaataattatttattttggagttataatgtaattgattaatataaattcttgatatatcatcaaatgtcaaactaccaccatataatcttcttaaatcacgatctagggaagttcttggtgaaaatataaggttgaatatgaaaatacagaatatactgaatattgaaattgcaaagaatcttcttcttttaatttgtgaaattgttaaatctcttaaatatgttgcttcttcaatgagtgattcagctatacttggacaaccatgtgaatttattccatttggttcatcaatatgattatattcaatatcatcactatcctcttcaggagtttcaggtaatactatatgggattgttgttgaatttgaaaagaagcattcgatcgtattatttttgaattatttggttgaaatatatatggagactctaaagatgttggatcagttgaagatgttggatcatccttatattgttttaaacttgattttgatgatataagagataatctagaatttgatttatatttactgagattattataagatgataataaattagtatttgacattgaagcaaatttgagagatcttaaaagtaaatcatcatcagcatcacctggtgataacaacattttatcatgtaaatgttgttttattgaaggagtttcatcaggttcggagacaatcggagatagtagtggacgaatttgatcagatgcatttgaaatggtactcagtgagtctgtggttgagttagttacaatattcaaatgtggaatatcgcctttacgttttgaagagctcatgattgataaatatgttgcaattaagggaatatatatgaaaaaaacagtgaagtcaattggtgtctttaggatcccagttttctttatctgctgattgaacattatatacgaagaaaattaattataattattacgtaataagtaatttacaaaaaccatcacgtgaccaatgtaaaaaattaaaataatgcgacgcgactggcttacgtaaaaaactagaattttataaataaacatgcatgggccaacaaagaaattataataagaaatgacaggatattttagctgagtcagagaggacggactgagaagggtttgttttagtggcaatctttaattttaatgtgagtttagataataactttattgtacttactcttctagaatcttcttctattttcttccttctacatctttaacctcctattaataactacaactattcaaccataccctaccattccaaaatactttcgaatattaagttttctgttcaacttcgaccccgatcattatttcactaaccttatctagactttttgacgatatattttaaatcttcaattttcatttctgtttcttttttatttacctatatcatctcatattatctttgcatttgcatttattcaacatacttagttgaaaggcttactttattttggaacatatcattatcatcatcaaatattaaatatattcaaacattatcccttttttctattgactaaaacaaatccttgacaaaataacggaaatataacattatagtcacatagcaaaaaaatggcaaattcagaatctgactactataaatatcttcaaggtgatctcttaaataatcgatatttaagagttaatagtcttaatgagggttcctttggtgttgtatcaatcgctaaagataccctaaatgggaataagttagttgctgtcaaatataatactggaaaattatcagattttgaagcttataatgaagttaaaccaagagataacataactaataaattatcttctgtaaatacagaagttaaatccttcagtttagattctaaaactaaatcttatgtgaatttaactacaaattcagcattctcaaataccagtgtctcaagaaataaagatgttagtaaatctattgttgaaagagaaacaaaacaagaaattttaatgttgaaaaaagttgataatcatccaaatattactaaattgattgattcttttggtacttttatggttttggaatatgctccaagaggtgatttacatgatgctattcatttaggtattgcccctgttgcaactgctgatgttatcgatgtttttatgcaattgattagtgctgttgagtactgtcataaaaatggtgtctaccatcgtgatattaaacctgaaaatattttaataaatgatgattggtcaattaaattaacagattttggtttagcaaccgatcgtttaatatgtacagactttgatgttggtagtgaacgttatatggcaccagaattattagaacattcagatattgatagttatgccgctgataaagttgatatttgggctttaggtatttgtttactaaatatagtctttggtaaatcaccattcagatcagcaagttcaaaggataaaatgtttttacattttgctgctaatagggaaactttgtttgatatatttccattcatgagttatgaccttttttctgttatgatacattcattgacaattgaccctgctaatagagatttagaaatgataaaacagagtttaaataatattgatgttttgacttatgattatgaatttgaagaagaagttgaagattctaaagtcagtgaattgtcaaatgataatgaagatcaaactgagaaaaatactaacggtagtgatcaatctaatgagaatgaaaaatctaaatctaatagcaatccaagtaccaatcactcaaactccaaatatatacctgctatcaatattgtacgtgaagataatatgttctctatcgatagtattattggtgaagatgaaatggatgaattggatgatatgtttgacattcctcttttcaaagatcaaaagaataaaaatccaaatactttatccaagccaatacctattcaaaataacgaacaaaatgattcagatttaggatacaaaaaatatgccgtcgatacaaagagagttagcaaatatggtaatatgcttaatacttataatttatccaatcacaacaatgaaaataaaaacagtcatttgagtaatgaaaacaacaataataattatagagttaaaagatggaatccaattcatcgtaaaccgttacgtattgcaaattacaattataagaaccaatctcaaagtggaagatatcgtaattcattcaaggatgactcttttgatttcaatagaaaagattttttcacacctaaatcggtattctctcattatatggaaaaggcctacaagggtaaacaacaacttcaacaacatggaaattactataaaaggtacggtaataataaggaaaacaattttaagtactcaagtcataataataatcaaaacttccacagttcttccaatcatccaattgagtatgataatgtttgttattcaaatagaagagcatggcaaaagagaagaagaagatcaagtcatgcatataataataacaataattatagaaacaaaatgaataacaataaatctaactttcttaagccaaataaccgaaactttggctcaagttggtcaaataatcacgagcaatcatcatataataatagaagatcatcgcataatcctaacaatgcaccacgtgtttctagttcgttgagagcttcaattgacgggaaatatgttccacctaacttaagactgcattcatccattcttttaggatctgctattgaatcagatgatgaatcagactcagaaaatgatattgaaactattgatggaaatcttgaagaaaaatacaacagaacacaaaacaatgataatgagaataaatttgataatggcactgattacggaaaacacagtaacactagtaacgatgaaaatgataaggaaaataatcattttatggatgaattctcttttgattttgaacaacaaagcagtggaactttgagaaacagctcaaatgaaaacatatcaaatactgaaaattataacaattccttttatcaaattgaatccaatgctatcgacatgttaaccaaaagcttcaatgacactaaaatgtttgatgaaagattacaaaattccaggaatacatcactgactacgactatatctaataatttttccagtgtaggatcaaatattggtacgagtccaaaatcagtgaagaaatatattccaccacatcaaagaagaagttcacattctgcaactgaaactcctaatatcaacattgataaattcctaacatcaaagaatagtaatcatcataatgaaattagtatgtctgctccaacaaaatcaagtatttttttcaataatatttccaaatccgcagttcctaataataatgataaccacacagctaatttaatagattcaaacgatgaacaatcagatgatttgtttgatatcgaagagaattaattctcccattcacgattacattttctaattcaaaaaacaagaacaaaagcaaatacaaatacaaattaaaaaaataacatttaaactacttttatataaattttgattttttttacttttttttaactttttttttaactttttttacttttttctctagaaaattatttatttattttatacatttaaagattgtcaaattgtataatttattttgcaagattgaataaatgtcttgtattcatttcaacattattagcgtaatgctttgttagaagaacattttcccataagacagccacttcagtatttgctctttcagtttcattaacttctgggtgatatacaccattttgaattctgtcttctgttgagtataatgttttaatttccccatatttacccattaatttttctaaaaatttaagaagtgcaacatcggttttttcaggtaaatgtagagcagctaaatataatcgctttgtaaatgctaaagctcttttacttgaaccactcttactattgaagaaaatcatatttaaacatcttaaaaataattcagctttagttgaaacattaactgaaggtttaatatttaattcatttgatgataatggatccattaatctaagtgatttatgtgaaaattctatatctgtgtctaatgataaatttggtaataatgaatataaataatcaacgaatttgtttaaatcaacgacaacttttctaggtggtaaatttgcaactaatgaaaatgaagtcataatacataataatatttgtcttacttcatttgcattcaaatctttattttgtaataattcttcagtaatttctcttaatatttgtaagaaatcgcccatcaaatcaatattaaccatatgaccaaatttagataaactttctaatacgggagccattaattttgcaggtcttgcttttaaaatttcaagataaaatgtaagtaacattttcaaaatttgggcttgatttttctctctttgttcagttgtaactgcatgttcagcatttttcatttcttgttcaattaattttcgttcctttaattgtttcttttgtgtcttacttaaatgaactctatccttcttttttactttaacaacttcgtcagaatgtaattctttagcatttggttgataatcatttaaaacagttaatgataataagatattaataacactctcatcaacattaaaatctcttcttcttatacttttcgataataaaatgacaatttcaagtgatatatcaccatgtgatgcatcttcaattaacaattcatcaagtgtattaacactctttttaaatacttttaattcaaattcattctgtggtcttttcattattcttctaatcaatagttttaatatttcttttctaaaattgaaaaatcttaaagatgatgctaattcacatgctgcatttgttgcaatgacacccatttcgatatcttgtggtgatgatttcgattgtgtggaaaattttgctgcttttatcattaataaatcaacataatgtttatagtttaagactaaatgttgttcaaagaatcttagtttagcaacctctttactaactttctcttttttctcaacttcagttaatggtctaatatgatatgatggtgatatacttttgaaaaccgggactaatgctaatacagctaattttgcagttaatggatttttagaattagacattttccttagtcttgaaagttgtaatatattttcttctggatcctcaattaaaagttgtgccatttccgcaatatcttccttagttttgatgattttttcagcttgtgttaaacctttatatgattcatcatcttcttcattaaattgttcttcttcttcttcttcttcttcttcttcttcttcttcttcagtcttatcctttttatcagaatcctttgattcaaaatctttctcatcatcagaatcaatatcactatcttctttatcaccacctgattcattttcttttgttttgatatcttttttaataattcgtcttttgaaagtaccatcagcagaacggattggtaaaccttcttcaccttcatcttcagggtttttgaaaactcttggtcttgtttcataatcttctagttcttcttctaattcctcttcattttgttgttcatatttaccattaccaatttcatcatcattgatatattcaacatctgaaatttcattatcactttcaactcttgagaaaactgaggattgtaacttttgatcttcatcctttcttctcttgatatttcttaattcagatgatcttttaacctttctcttagccatgttttatgtttcagaaccacggtaattgtcagaaactgaactatttacttatcatcaactgtatcgcagaggaaaatttcattaaatttttcatgtagtaaaaaaaaaaatttgaaaaaaaaataagaaagattacataatacaaaaaattaaggcttacgtaaaggtcacgtgctgtaaagacccggaaaacactgttcctccgataaatcgtaataatattttaggccattattattgtgattgaaattttaatatctcctctttacaatttgatgggttgagttgataggtgtttctttccaataaaggtttgcttttgaacatatattcaaacttttagacgttcaaaataccacaactcaaatgttcagagcaagaagtgtactaaagtctgttaatgtgtcatctaaaattgtcttaagacaatctagatatttacatagttcaagaagtatattagcagcaacaacttttgatatgcctgcaatgtctccaactatggagtcgggtgcaattgttgaatggaaaatcaaagaaggtgatcgttttaattcaggtgattcattattagagattgaaactgataaatctactatttctgttgatgctatagatgatggtattttagctaaaatcattttacctgatggaactaaagatatacctgtcggtacaccaattgcttttatggctgaagatggtgatgatctaaatactttagaatatccttctcttgatgcaaaaaatgcaacaaacgcagtcccagaatctacaccagttccaaaaccaactccaactcaagctgcaaaggaaccagttgcagaaccaacacctgtttctgaaaataaaactaaatctcactctgaaggaagtatatcaaataccgctaatccaaaccaagttttattcccatctgttgaacttttattaactgaaaacaaaatatcaaaggaagatgctttgaaaaacattccagcaaccggtccacatggtagacttttaaagggtgatgtccttgcatatttaggtaaaattccgaaagatcttaattcatcaattgcgtcatatttaaagaaaacatctcacttagacttatctaatatcgaattaagaaagccagtagaatcaaagtctgaatcatccaaatcatctgctccaacaacaaacccaaagatagttgtttctgaaaccctccctgttaatatagaagttagatattctcaaattaatgcctttaaatcagcactttcagagattattgaaataactgaacatcaagcttatgctgaaaatatcatacctgcatcagatttagatgatccgttatttgatgaaattattgcaccagcaagaaatgcagaccgtttcactgttacttataaattaaatactgatgaatgtgatgttgaatcattggatcttgaattaacattaaatgaaaaatgttttgatgctaaagatagagcagaacttttcgttaaatatttcaaggctaatcttgctgaatttttaaaagattcagataaataagtatagattgtatgtcaatcatttctttatatacagtgtgtatcatttaattctaagattctaaaaaattcattatattgaattttgttgatgtacaaacgccaaaatttctgcttcaaggcgatgaatattcttttcttttgaacataatttatatcaacaacacaaagtatttacaacaatttaagtaatatgacagagtcagctttaacatttaatgggatagtgcccttgctacctgatatattggtggataattttagtttgcttcacacaaaaaataccacaacaccggaaaacacgatcaaatattgtttcgtttcacacggtcattctgatcattataaaggtttagacatacaatttacaaatcttaccaatccagttaaaatattattaacagagactacaagggatctaatacttgcacatagttcaacttctaattctttgagacgaaatctagcaaattgtacaattgtttctatgaataagacaatagaactagaacctaacttaaaatgtactttcataccgaattttcactgtcttggaagctgtatgattttcattaatgatcgaaggttgaaggatggagttactgaaaatgatattaatgtattatatactggtgatgtaagatttgaagatacagttatatcatcatttaaaactagtagcgttttatccccttttattttcggacataaaaaattgaatatgttatatctggaaacaacttttgcatatagaggtgtaaatatagagataccagaaaatttaaatggaattcaccaattgattgatttgataagttcatatcccaaaggtacacattttagattcccacaactaacatatggatttgaggaagtttggctaaaagttggggaatattttggtaataggtgtaatatttgcatagacgataaattgaagaaattatttgctgccttcaacagaacaggtgacatatactacgagttagagaaacgagtgaatgtaattgataatatagataagttgaacatgatgttggacaaacaaaatgatgatgctgaatatactttttttataggttatgtgaagaataatgtggtgaaacacaagaagcccatgatcaaaataacacccgctatagatctatccaaatctgagtacaaagaggtttatttaggtaaaaaggaagacgagttccatgatatctacctgacatcagaagaaagtgatacatgggaaggtattttctggtcttatgaaaataaacgttatttaaatatgaactatattaagaatcataaagatcaaatatatttaccaatggaaattaaatttatttattctagacacagttcgttctccgaaaccaaatcatttcttgaattatttaaacataaaccattagacatataccccttaacagaatcttataatacatggcatagtggattcaatatgttgaattattatgggataccaaatgccagttatgataaacaagctactataaagtatggtagttgtaataagcatgttgttaatttaccagagaatttagaaatagttgatcaatggagatcaaatgactctgaaaaggagaacaataagaccacaagtttcaatagcgtctcaactgacaatgattttgactttgatgctataggacaggacttaagaagatttggtgatcataaatcgtttgatgaaagaaagatgatgttaactccatttgatggcagacgaattaggagacagaaagaagagaaaaaaaggagatatgatagatttttagggaatactaatactgccaaaattgatgaatacatgaaatcggaatttgatagtaaatcaaataaggcagtagttcagttcattagaatgagcgaagacaattccagcattgttgaaaatgaagctaaagttccatctaaaaaaaggaaagtgatgccgtctgataaggtacttgatgaacttgtaaggcaaataaagttttagaaatatttcaaattatgaattgtattaatgttatctgaatctcagagatgaaataaacttgatcgtagattcaatctattttaactgtgacacgtcttgcgtgagatgtaaaatgtataacgtaatgattttatagtttcaacgttcttacttatatacgactatatatctttggccgataaacatggatcagatacgtttatatgactctcattgtcatttatcaccagatgttacaataaatgaatacgatgagctgaaaaaatcacttggtaataaggagtggccaattaatttaatgatgacaaatcatattgatagagagctcatattcaagttaatggatgaagaaactataagaaataataaaaatgtactacttaatgtaggaatccatccatggtttactcatctatacactaacgagaaaaggaatattaatgaaccagaaattgaattcaagaaacgacactatttttcaattttagaaaagcattcgaaaaatgcatctgatgaaatcgacaaattgattgaacaactgcccattcctgaaaatttagatgatataatagaaataatggaagataaattaaaaagtaataataatgttaatattggagaaatcggtattgataaagttgcaagaatacccaattctggatacttaggtaattcttctagtatctcgggactttccaattatagaattaaaatgagccatcaattaaaaatatttaaaagacagttaaatctgattatttcagttaataggaaaaaattatcaacatcaatgcattgtgttggtgctcaaggaacaatgtatgaatgtttaaaaaaattcgatggtttgattaaagaaaaacaacctgataaagttgttaatatggcaatgcattcatatagtgggagtattgataatgctaaaatgttgatgaaattatctaatgttaaagtatggtttggaataagtgaatttgtgaatttgaaatttgaaaaggattccaagaggtggttattattgaaagaacttcttcatataataagagattgtgcattagttgaaaccgattttggtgttgatcgaatgaaaaatgaacataaaggtaatattttgcaaatttacacaaaacttgaagaacttgaagtaaatgatttaaatacatctctttatgaaaattggtgtaagtttcgtcaagtttaacaataatacattttggaatatagttaaataacatataaagtaacagtagtaaaacaacaatacaccacacaagtgtgataataacataaataagctcatagcaaaaggatgaaaaataaaataatataaaagaaaatatggtaaataaataagtaaataaagtaaagtaaagtaaagtaaagtaaagtaagtaagtaaaataaaataaaatgaaaataaaatgcaataaccaacccatttaggtaaaacgtaaattgtaccaatctaacacatgaacaaatataacacaaaaacacatatcataaaacaatgatcaaacatcgaaagcaacataattaaaatcattaattacaccatggtattgttttgtttttacaagatttaatacatttgactgcaaataccaactccttatatttgaaatgactctcatcttcgaaaaaaataggtgtcttatcagacaaattcaattcagttgtaataaaattatcattttcatcttgtgatgttattggtgataatgagtttgataaaatagttgcatctgtaatttgtgatgaatatctttcaacagatgaaaaaacagaatatgatgttgacctagatatatttgaaactgatgatattgtttgttcagctgggtctaattgaatgatatcatttagaatctcatcctcaaaaataacttgtggttgaattgaaggctgaggttgaaatgaaacagaattatcgtcaatattgaaagttgtatcaaattcgtcatcatcaccatcatcattattattcaataaagatccactacgagaacgtgttgtaactgttcctgttgttaatgattttggttgaatatttgaatttattgaagttgtagaagttgaccttattcttgatgtagaatcggaatctgatctgtttctattggatgttctagtattattagtattacttctctgtctcgtaccacgacgacgatttcttcttggaacacaataatccaaaggtaaaggaactctcaaatctaaatccaaactcaactctttagcaatattgagtttatagaaaattgatgaataaacatttgcattataagaaaccaaaacaaattgttcacttggaagtatcatacgtagtgcaaatggttttgatggtaaatctgctgcgttaccaaatttaactaactcctgtaaggaaaatgatttaaataattttgatttcaaatttaaaagttgagcatcttgagctgtataatctgtatctaaaatttgattaatgtccggcttattgtttaaaagcttttgaatatataacatgtcttgagagaatttatcagaatcagagagattaatatttgaataatcaggtaaaaattgtttacctttgctaggagaaaagaaatcattatcagtttttttatctgatgaagtgtatttcctaaatgacagtttatcaaaaagttttgaaaaagaagatgaactttctcttgaaagtgatggtgtagtaggtgaaaatgttgaattggacatagttgaggtatttgattgagaaaacattgttgaaagggaagaattggaattatttgaaatcagtgcatgtcttggctgaataattctacaatctgaatttgttgacagatccagaaatgatgaatttggggtattattttgtctatttgatactgatgaaaaagatagtgatgttgatgtcaaattcaaatctgcaatgctaaataaattcttagaagaaccaataccttgacctataaaatttaatttagaggatgattttgatttaatatttagatttgggtcaacaaatgatggatttagttcattaaaattatatgcaatgtatctattataattgccctttatatgaaataagttaacttgtgtagaattgatttcaagtaataagggtgtaaaactagccagctttaaaagatctacccatatgtattgctctcatttgttcagtttcatcggtgtagtacactatagacaaatgatgaactgaagccgagtattccggagggtcctccacttcaagattatggtaatggggcaagtctgataattcatcagtaatttggtaaagcattcttgataggggtatttaataagaagcaccttttagatgatatagttgagagggtataaagtatattgattgcaatagttagatagtaaaatatcaatgagaatattaattacaatatcactaatcataattaaatctagatcacgggagatcaatcacaagatcatttaacaatgtttcaaaagaaaattgcgagattctattaggggaagggatttgatttaaaaccagcaagtcattacgtaagttttattatgaaaagttgcctatatagcatgaatttagcatgctttattactaacttcaatgttgagttgttattactgggtctttagtatacaatgctatcgtatcatcaatcatttcctcgtatagagtatcctacagaagtactcgtggaaacttatcctggtcgtcagttttatctgaattcttcctcatagtgatggacattcagagaatgtatacaatttaggtgtatattcactttctaaacaccctgagaatgataattatttgataccaactgatccactctgtcttatggctcttttagtagtgatgaaaaatgacaaaatactcaaattcccatcagtggaaaatgatataactaaattatcggcatcattatcttccaataagacaatagatgaattttcttctatatcaattttatcatattcggcatcatccgataatcaattacctataattatagaagattcaaaggataaaaaaactcatcatataaaacgtaatatatatcattccaatttactaaattcgttaaattcatcaaaattatcattatacgatcaaactatttttaattatattaatgatattctattcgattattacactatatctttattatcattggatgattcaattttagaaaaatattattcaacttcagattatacactccctgcatctataaaatcaatcaaaccagtcacgtcaatgataaatactcaactcaaattatatttactacataggaatgattttaatgtaagaaatgaatcttcattccagtatttcacatctttattatcttctaagaaaactaaaatagcagcagatgaggaaatgaaaacaattaaaaataaagctttgaaaactttattagatttaaatgaatctttctctaaaagtaagtactggaatgataattaaaatccaacattacttgacacacaaatagctgcattcacattctcatttacttatatgtcacaatacattcccgaatacaataatattttagaattcaaaaatttaactaatcattcaaaaaatatcatttgtccttacttataatcatgtaaatataaatattatatatatatatatatatataataatatagttgtagttctaatatttccatttaatacatgtactttaatcttaaaagcaagattggaaaaattctttacatgaaattttcaaaatatcatataacctattcgagtttctcttgaaatattaccacttgttcactcttctcctacaggttcagctttgatgacaacagagaactcatgtatccgtttatgtttaccacctaccccttcatttcattcagtacttgaatcaattgatgatgatgatgatttcatttcacagaaatcattacctatatcagccatatcctcaagacttaactcatcatcaacagtttcacaaaataaaacttcaattatatcaagtatcttttttctacttcactcagatatagataaatatcaattattacaatttttacttccacatagatctagaggtttattattatcaaaatatcaacttgttaaatgtttatatagatacacaaatacagaatctattaaatctggtataattagatccgcaattgattcaattgaaattggtaaaaatactgaatctccgacattaaaatatatgaatgacattcaatcaattttaaaacttcaatgggaagaatggactttattacaaaatacttatttccaaagattactagaagtacatcataaatataatggacagattacattacataatttaagttcactttttgataaattatttgtacaaacgatgcagccacaaaaactagataacttatatccgattgttgaagccatatttgatatgatatatgttattaacgcttctaattcatccgttaattcaaataaaactaacgaatcaatgcatttagttttttcttgtattttaaatagaacaattataacagaaacttgtgtcttcaatgcactttgtatgaaacctaaaggtttagcatcagcaatttggaaatcaagatcagatctttgggatgtcgtatatggtgtagaatatttgaaaaatcatgatgttcatatatggaaaaaacttattgattcatcaaataacaaattaaaaagaaatgataagtccaattcaactaaaattttgatagttgttgaaattttgcttggtgtacctttttctattatgagatgtacccgtaataatggaaattttgaaagtgttgtcgataaagtaagtatttttaagaataatattagacaagaaactgaaggtttctgtgttgaagaaaaattagacggtgaaagatcttgtgttcatatttacagaaacgaaaatggcaaaatcatgacaaagttttattctagaaatagaatcatccaaccatggtatggttcatttgttggtgataataatggcattatcactcgatatttgaaagaggaatattttgatggcattgatagtataatattagatggtgaaatggttactatgagtgaatcaacaggaatgatactagggttccaagatgtgaagaggtgctctgaaaagttgtatagacaattaaattcaattgacacagataatgaaaatattggcttatacaattgcttattatgttttgatgtgctatattataatggtgaaactctgcaagtaacgccgttgataaaacggaaagagatacttgctcgtgctttgagtaaaatggaagaagatagttttaaatttattaaattacataaatggaacattggttacaatgcagaagatattaaagttgctatggagaatatcataaagaaacacagtgaaggattagttgtaaagcattgggattctgtgtatttggtaggtgaaacttctaataaatggattaaaattaaaccattttacttggaagaatttgttaatgatttggatgtcactattattgggaaattaggatcgaattatttgtgtgcattatatggtggagatggtaatgaaagtatcaaatatacgggagatatgactgatagttatcgacattggtttgttagtttttgccttatacgttttggttttcatactgaaataacgaatgcaattaacgagaaaacatcagggtcttggattccttataaaaagtttgaatctgatattgatttacatgagcatagagtcaaatttggatctttaaaaccagattattggatttatccacataacagcattgtaatcactattaaagctagaaattttgtcaatgcaagagctgatatacccaaccgttttgttcttaaatcaactttaagacatccatattgtactgaagttagacatgataaagagtataatgagtgtgatacaatcaattgttactatgaaaaactacatgaaaaaaaaagaaatcatatatctggtgaatttgatgataacaagaaaaataaacgtaaaatgaaaaccaagaaacaattgcaattgagtaatgttaataaaaattttatcaaaacatttgccaaaaaagacactttatttgaaaactttacattctgtgtaaagactgattgttataatgatggagtgttggttgaaacgagtgaaataaatggtataattgaatcgcatggaggtaaagttactacgaatccattacaatatcatcatggtgaccgtattataattttagcagataaatacacactctcagtcagtgagctgaaaaaaaactacaatatttttaagtttaaatggtgtgaagattgtatacgaactggtcaattagttaaaccagatcctagtcattgtttatctgtcgacgatgattttttatcagaatgtcaagaaaatataaatcagtttgatttgaataatacagttgagtacgattacaaaacattatggaatgtagctgataaatatttagagaaatatccaaatgataaatatactttggtttcaaatcaagaagaaatgataaaactgggtatgaagttttacaataagatatttatgcttttaggattcgaaaatagcaccaacgtgaggcgtgaggtattggaaatagagatcgaacttcgtggtggtatattggtggataatcagtatgattcaaataatattgattacattgttatagacgttgaacagtttatagatctaagcaattatcataatgcaaaggttttgaagtgaaactgaattgatgaatttgtgtaacgattaaataaacttatactatagtaatttgatttggtgatatattttaatctcactcaaagaaaaaagttgatgtaatttcaattcctaatccttatgtatccagtcaagttgttaaccaatattgattcaccacacaaaataatcacacaatgttctctaaaacgagtttgaaactaatcaaatctaagaggtgtgcgattcattactatacaacaaccgaatactacggttacaacagaaccggtttcactagataataaagtaggccttagttaaagcagatacattaccagctgtggaacatggaacactagataccatcaatgcaccagtatttaaaaccattggaacaccagcatcttctttatcagttactctaccaccttctgttcctgtaaatgtgaaaaaaggttcagttataagtgtttactcgtttgaaaataaatctaagggtaaaggtactgaacaatttataaaaagtaattggaaagttattcagccattacgccagattttattatcaggttatgcatcaagatatcaaagtgttattagtacagttccattacaattacttgttagtgcatatgattcagataaaaatagtaaatcatcatcaacgaaaagttttgtgagtttaacattagatggtagtgctgattggattttatttgatccaaattcattacaatgttatgtaggtaattcactcaacgtgagcgttaagaatcttccgaatcaattgcattatggatttaaaggtagaggatatacttggctgaatggacgtggtatagccgctgtggttggtaaaggtagcgtttttaaagttggattaggattccaacgaagaaatcagagttgatagaaataatatatttgcggttactgtgagtgacttatcggaactttccagcggtaataatattactgctgaaaagtggaatagcatggatggtttattccataagataactgataatgttgaaaataaaatagaatcttcagaaattaaggttacaaataacgtttatattgataaaacattgtcatatttaaagaatattacatcgaaagcatggagtatgctcaaaaccggacaatctgaacttacagattatgttatgggaagtggtaattacgttgttgtcaagggcccaagaactgttttgattcaaacaggaagtggaagtgacaattttgttgtcaatgctaaagactttattagcaagagtacaaaagataatgtttcaatgttagaaaatgtgattaaaaatgaagaacaatttagaaaacctgaaccaaaaactggtgataatttgggagttgtaagatttattgatgggaaaccacaatacgaaaatttagaaaattttaataaagaagtgagccgtatcgaaggacttacgaacaagaaatgatcaacgatatataatgtgataactgatagattaagttgtataagcactgtatataactgttattgtagaaagagatgcatgtttaaaaattacgtaatagaaaagtagaaattatatagttttggtctcttatcaatttcgatattaatctgcaattgtaacttacacctttacactatatatcatcaattgtatctctcttccgcatagttaatcgatatgtcaggactagaaagtaagtatcttataatcgtatatcttgaaaaacattatttactaacatctcgaatattcccttgataacatagattcactttttcaattaaaatttacatcaaaacaactaaatagacaagctgcaaaggcaggtaaggaagaagaagctgaaaagaaaaaagttaaaaaggcattatcacaaggaaacaatgatattgcacaaatatatgcacaaaatgcaattagaaaatcacaggaacgtattaaccttttaagattatcatcacgtattgatgcagttgcatcacgtattcaaactgctgtaacaatgcgtacagttactaaaaatatgacatatgttgtcaaaggtatggataaagcaatggaaggtatgaatttagaacaaattactaaagttatggatgttttcgaggaacaattcgaagatttagaaagttcaacaaattactatgaaaatgtatcaaatcaaatgagtgttagtaaccaacctcaaggtgaatgttgatcttttaatgcaacagatggctgatgaagcaggaatagagatgaaacataaaattggtgaggcaaaagtttcaggtcttggtagtccagtaaatgaaagtgaagcaactgtaacatcaccagaggaagatcgtcttaaagaaagacttagagctctacgtaattgatcttggtatataaaactacggtatcgatatatttgatgaaaattaacatgatttttcatcagtgatctccataatttttgacccattacaattatttactaaacagttttaaaatttgtatatctaaaaccattgataattaaaagaagatcctttccgaaaacatttaaagaccagcggtaatgtaaaacataaatcaaaccccatagttccacagtatataatcttaaatttcatcgtaaacttttcttaaaattacttattaaggatgaagtaagcgttccaagatttttcccagtgactttttgacagcctccggggttaaagcattaagttaagaagtcgtcctatttttggaatacattcttcttttcttatcaaagatacgcaagaatccacgatgagtaaagaggtaccagatggtgagtatgaattggacatgtctgggctattttcaggattacaaacggatgtttttggtttgcgatatggatttcttcctaatactgtggataattcatacagatcaatgatgtatcgagaaagttcaaatgcagaaattgaagttggtagttcgaatgattttgaaagttgttatttgttcatggagacaaaggccaatgaaaaagcgattactacgactcataaagaagatgatcgtatgtactttgaaggacggtataaaaagcctacactaaataatactatttcagcttcaaataattataatgaatttttattatcatttgatgaaattagtagaacatttaaaatagatggatttgacgggtttattaaaatcaataaatcaagagattcagaatcagttattaataaaatatcaaaacttgaacatacatacaaacatcgtgctcgtaatacaataaatgataaaaaacccgaagatctgaaaattgttgattatttattaggatcgattttgaacagcaaaaacaataataatagtacaccaaatactaaaataaataagataccacaattgccaaataacttgaataactatgaatcagttttaaataaattatcaccgataaggaaatcaaaagtagctcaatcgtctgcttcaccatcaccaatggtgaataaactacaaaaaccagtatttctatcaaaaccaaattcaccactaacttcaaatcatcccaaatcgcctgttaattatacaccaaaaattacacaaacaacacaatctgcgcctacgacaccaaaaattgcaaattcacctcatcataatggtggtatgggtgctcggaaacaacaaaagagtttacttttaaggaaagctgaaagagcagttggtataaacaacaatggaagaatatacaaaccgaaaacaaaggaagcgtcaccgatcaagagtaagacatatattgatgatgtacccaaacctaggcctgaagctcataaaaatatgatacgggaacgtgaatttaaagaagcaagaccagatcaagcttcatttgaactatttatagcaccaccaacacaaccttctcaaaaaacagttgttgaaaaaatcaatcaatcgttacctaaaaaagagaagattatttcaaagataataaaaaaagcatcacgggaacaattgttaacgaataaaccaaaaccggtcgttcaaaaggaacaaattatgagtgatgaagatttagaaaattttgcagaagaattggaatctgaattagaggcagctaacgataaaagagatgaattggacgatggtgatcgtacagtaaagtttcctcctaaaaagtctacaacaagtggtgaagcaaatgaagcgttggtgagtaatggggaaatattaaaaaagaataaagaagaagaagaggaacttgagttttctgattgggatgatacggatgctgttgataactttgtagtagaggaaaataatgacagtgatttccaactaatcattgaggatgatccattaaaatcaaaaagagaaaatgaaaaggagatgcaagccagacgtgaaaaagaaagagaggaaacaatagagtttgagaaacaattaagacaaaaacaaaaagagcttgagaagcaacaagaaattcaaaagaaatctaatacaaaaacagttgtcaaaactactaagaaatctacaaaacaaaatgtagataatggaaaaattaaggaacattcaactgaaaaggaaaaatcaaataccaagacagtagaaaccaatgatactgaaatagatgaggaactagataaggtatttgatgatgtttttgatgacattgaagatgaagaagatatgagtgaagaggaatagaatggtttatttctttcaagatcatcagataatatacgtaataatcacagttataatagctgctttataacaatatcaacttttactaattaaaacaaattttatttaataattaatatacagctatgtaaagtatacccttttaaaggttttaatattaaaatattatcaactaatgtatttatcctacataccactcttatatacgacataatggttcgatgtttgcacatgcaatcaattcatcgtataaaatttgattacctaataattatctcaacatttttttcactttgacacctggatgttaggaataacaacaattaatatacgaattttcatgttgttaaattgcattgattcattttaaagagcttggtgtaaggttatcaataattgtttataataaccgataaaaaattataccaatagaataaaatgtctgaattaatgacattgaatttaactgaaataatacttcaattgaatcaaaccattaataatatgccttcagctaatcagatatttcaacttaatcaattacaaatgcaatttaatgaaaataatacaagacctgttcagatttcaatttcattactagttatttcaattacaattttactatttatattccgtaaaacaagaaaaagaactgaaaagccaatgaaatttgatattgaattcccagaagcttcacaaccaaattggaaaggtaaaagattaacaatacctgatatatttcaacctgacgatccagattatatttattgttattgtcctgcaacatcacaatatttaggtaagtataaatcacatacaccagaggaaattgatttaattattaaaaagtcacaattagctcaaccagtgttttataaagataaaaattttgaatataagagaagaaagtttttacgtacattaagtgaatttataatcaagaatcaaaaggaaattgcaagagttgcatgtagagattctggtaagacaatggtcgatgcatcaatgggtgaaattatggttacattagagaaaattaattggatattaaaacatggagattcagttttgaaaccaagtacaagacctggaccatccaatatgttaatgaaatataaaaatgcgcaagtttggtatgaaccattaggagttgttgcagcaattgtttcatggaattatccatttcataatttaatgggaccaataattgcaggtatcttcagtggtaatggtgttattattaaatgtagtgaaagggtcagatggagtagtgaattttttatgcatattgtgaaaagcacattaaaaatttgtgaaattgatgaaaatttagtccaacttgtttgttgttggggtaaagatgcagatactgttagttgtaatccaagattaaatcatataacattcattggatcgaggccaattgcaaaacaagttgttgctaaggcaagtgaagttttaacacctgttgttacagaattaggaggtaaggatgctgttattatatgcgatgattacatgaaacaaaagggtattgatggaattgcaagtgttattttacgtggtacatttcaaagtgcaggacagaattgtattggtattgaaagagttattgtatgtggtgatagaaataactatgaatcattaataaataaattaaaggaaaagattggtatgtttcacttaggtagtgatattgatcaagttgaggaaatagacatgggtgcaatgataatgggtggttcaaaatttgatgaaatggagaattggataaaggaagttgaagaaaatggtgagggtaaagttatttccggaggaagtagatttacgcatccaaactatccacaaggacattattttaaacctactttgattagtgatttaaatccgaaaagtaaaattgcacaaaatgaaatttttggaccaattttaagtgttatttatgctgaaaatgatgaagaaggtttagaaattgcaaataattcagaatttggtttaggtggttcaatttttacaacaaatagagagaaaggttttaaaatggcaagtgaatttaagacaggtaatgttgcaattaatgattttgcaactttctatgtttgtcaattaccatttggaggtattaaaggttcagggtatggtaaatttggtggtgaagaaggtttaagaggtttatgtaatgaaaagagtgtttgctttgataaaagtaaatttattagtacaagtataccaaatgtaattgattatccaattaaagatggtaaaaaggcatggacatttgtttcatcaatgaataaagcagcatatgattatagcttatttcaaagaattaaagggctgtataaattagctagaaactctaattaaataaatagataaatagatagaactttagatcaaaattaaaaaaattaaaaagtataaaacattgataggatatattatttacaagaaaataaactaaaatctgtttagtttaaagatttttcggtagttttaaacgagtttgtgaacttttcaacatatgatttgtaagttgcatctatatcagtagttaatttcttaataatatcttttgaaccatcaactttctttaaatttttcaatacatttgatctaataaaaggtaaactatttttaaaacttgtatttgatttatattgatctaataaagctttcatatcttttatttgcttctctcttaattcctttgttgaatttggtaatttaatttttaaaagttgaggattttttggatcaagttcaggatttaaattcatattagcctctagaattgcagatatcacttttttagaatgagcaggatcaaaaacattaatatttaaaaatccggtacctttcattgcactcatagcaatttcaggaaatgtagcagtataagaatcatcaattttaatttttaagttatcaaataatgaagggtttgccttacccattttaagttcagttaaagattttgaataaagtttaaaagattcatcacattgttgtttaacttcggttaatattttctttggatctagaatttcaacttcatcatcttcaactggtgtatttgaagatgattttttaccattatctttctttgaagaaccttttttatcctttttagcccaaacaaatggagaggcagagaaataacgtaatgaaacgatggaaggtgatgcaattgatgaaactctagaaaataatgagagcattgatccggagtgagtatatatagttctaagttgaaatatcaatgaaatattaatgaaatattaatgaaatattaatgaaatatcagttcatcattataagatccaatgaaaccaaaaatctcatgtaatgacagcaaatagtaaaattcaatatagaaactactcggaaatttggagtgaaaaggtccatcaattcggaaatttggaacaagctgtctttttcaccaccacagagaaagggtgggaccgagccctgacatatttgacacatcagagatcaatagttgaaaaatgacaataaaacacgatttttttcaacatacaatagtgatatatcataaatgtaagttataaaagtaaatctaatagtgtaatagatagggtgattttgtaactctaatacaaagcttggtaaaaatatataagaaaggagtgaagaccttgtataaatttgtattcgtttatatatagcgggatgatttagtataataaggaaacgggactttgaggctcgtctgaatatttgactatttttttaaattaattcccctaattactattgattgctttcttttacttgcttgattactattgattcattaaatattcaacgtgttcgtgtttattgaagttaataggtaaaggtttatcaaatttgaatatattaaatttataaagagcatcaatcccgttatcgatttacaccgttggcatcaatttaaacatcgcatccattttgcaatttttttattaaagtatataatatcatcacaaggtaccttacatatttaatttattagtcaagtagagtatataccctttgatcttgtttattttaatagaaattatctaattatcaatacaatcaatagaaattataatatatcaacactttcacttcacatcttttcccaaataattcatatatcccgttaaatttctacccagagtgaaaagtcaacatcttcataatggtctcatattgcccggatgtctctgaattagctcaaaatcaatctattcattcaaaatctcctgtattacctttaaatacaaatagaaatactgtttcaatacatttatctgatttctctcaactgacaataaatgattcaactatttgttcatttgaaaatgatgaaatgatgcttgatcccccaatatcatttagtgaaaataatactagtaatagtaatatgaataacaataataataataataataataataataataataataataataataataataataataataacaataataatgataatgataatagtgatattatagataatttgaatattaatgaatctcagataactcatattaggaaagtatctgataattctgataatattgatagtatagacaacttagactatccaattgatcttgaccttgatcttgacttaaatattcaaaattatctagatttctcagatttgaaactatcattatacagtcctataaatacatcatcaacaaatcaacaaactattacatcaaattcaattgtttcctctaaaaatttctctaatttagataccccagtttctaaaatcttacaaaattcagatgttgatgcagcaattttgaagcgttcatttacaagattaaagcaaacaagtgaattaattaatacagaacatgtctatatcttttcccttaagattttagaaaaagtttatttaaaaaattttatgtcagataccctaactccaatatattttactgaattcaaaaattcagtttctaaacttttaaaaaatcatcaagctttttatgataatttgcttgaagtttataataaatggcatgaagaatctttgaatattaaaagatgatccaattgataatataaatataaaggataaaattaaattaaatgcaaaatcgccagattttaataaatttaactatgtttcaaatgaaaaagtgtacttagaaactataataaaacttatatcaaatgattcaattgatgttgatttatattccacttattgtgcattatatcatagagttttaaaattttcgggtttaaatgatattgaaaaatataagagagattcactaataatattaaatgattacctagttgaatataagaatattaatgataatatgtttttagataaacatttagatacaagatttatatcagttgttcaaatgccaactaatagaatggtaaggtataaattaatattacaatcattattgaaaaatattgaacttgatgaaaaaaataaattacaattatcatattatgaacaaactgtaaagaaaattaattctaaaattgatgaaattaatagttacgttggtaataatgatttaaaattatctaagattgatgaatttaaaaatttattcaacaaatcaaataatctaatgttaccaaataaactgtttttggataatttacaagatttacaactttcaagttcatttgcaatcgtgtatactaatcaattagctggtactaataaacacaaatcaagatcaaattatagtcatagtcatagtcaatcaaagaataataaatcaagcatattaaattcaaattatgtttgttgtagtttattcaaatcacatttaattttttcaaaatgttcaacagtttattctaattcattagatatactttttataataccacttatgtcaatattcaatttagacacggatttccatgattcaaatttttcatctaattatgaacatattttaacgtttaaatttgaagatagatttaatgtttatgaattaggtatgatatttccaagtgaaaaggaaaaacttgtttggtttggttgtttaaaaatgaatatatctaaattacatttttcaaataattttaataatgcttccaattcaatatattctgatcttcaaagaagaattctatcacttgaatttgtggatgagattgaaaagtttaatgtttcatcatatgttccaaatgaaatttcaccaattaataaatttaatcaaaaattgaacaatttaagtaatgaagttcattattttgatgttgatcattttgaatccaatgatagtgataaaccatttgatgaaccatatatttctagaaataattcaacaatttcaataaaaccaaatgatttacaaaaagcttcattaccacatagttcatcattttcatcattagtttcatcaaataatgaatttcaaacaatcaaagttacattacaggaaagagttgcagctcaaacagtgtatcagacttatttggtcatcacaatttgaagtttatacattgaataattcaattagtagatcattttcaaatctaatattccattcaaaattatcattattatcattaaatgccccatcaacaccatcaagtaattcatttgttccaccatcaccatcatttgttaataaaggtagtgattcactgggatcaccaattaaattaagaaactcaagatcaatgaaaagtataattactaaaccaactaataataacaagactagtagttcaggaagtgttaataactctcatatgaatgaagatcttttgaaaacaccgttatcgacaccaataagtacacaaaatccattatttaatagatcaccaccatcatcacaaagaacgggtagttcattgaaaaggggatcatcaagggatattgtaggtccaaattctagctttttaaataataatgataatgataataataataataatacaggtgattcaacttttgctaaaccatcaataattagacatagtagtagtattaaaagttttacaaatttattcaatagtaggtagcagtttgggtggtagtagtttaaaacattcaccaagtttaaataatataaatattaagaaacatcaaacacaatttgacaatgactaatggtaatggtgaatgatattgattcaatttcatcaaatgcatcaactagtagatttgctacagttagtaaattatggaaaaatactatacgtaataaaaagagtaaacgttaacgttttaattgttcgttattcattaaggcgatatatataatatatagtaaataaatagataagtaaataaataagttaattgtaaaacttagtgaatggaatttttccttaagttttgaagttgaccatttttcaaaatctttggaatgatttcatcttcaacactgttgaaatcaccaaattcttcattcagagtttgtttacttgcaatatctaattgaccacttgaaccattacctgtaatacttctataaacatcaaaatttgctaaaactgcagataatgggattgaagatacaccatgaacatatttttcgtattcatcaacatcatcgataaagactaaaaagtcttccttattacctttgtaaaaaactcttgtttgtgatgacatatttgttatttaattaatttgttttgtatttgtatgtgttgtgtttaatagaaaatagaatattataattagtatactacaaagttgaggaaacacctgatcttttatactttaaatacttgtacagtcacagaaccagtccacggaaaggtttacggagttggaagttattttttcaatgatttaccgataacgtcatattgcgctctatctcactctacatagtggaaatttctggaaacttgtcctctccctggtatcatgggggattgttttatttccaaatatagaagtccatatgagagagtgttaagcaataggcaaatcatgatataacagttaccactgttatgtattaataatatattcatacgtgtttaatctatgtatctaacaaaatactgcgccactattaggatatgaaatgtggcggtgtcttaaaagacattttacatgaaaattgtaaaaaattatgtaaaaattgccctgtttcttggtggcgtcactctataattactaatagatctcttttgatatatcacttcttattctacctgctataatcaataaaggataatgttgaggtatgcagtaggtcaaaacgggcttcattcccagcgattttctgttttattctctgctaaaacttcaattaaacaatttagaaaattaacaacaaatggattaattaattctaatgctcatagaatttcaacacgacgttgtatttcaaataatgtaattgttaattataatcatcataataataataaacgccaattttcaattttcactattggtaaagcagttacaaatgctgctaaaatacctgtatatttaggtggtggtgtagttgctgctggttcttatataatgtataaagttgaagaagcttcaaattatacttctgaacaattagataaggcaaaagaacttgcaggtgatgtaaaggaaggtgtaagtggatttttagattctgttctttcacaatttgatggaattggtggtaatggtgataataatggtggtgaaaatggcaataatggtgataataataatactgaaattgttggatctgcaaccgcatcagctataggattctctcaaaacttagatgatgatgaaaaagaagaagaagaagctcttcttgaagatgatgatgatgtcgatgaagaagaagaaaataaacaaagagaagttttagaagatcaaatgctcaatttaacaagacaaatgattgaaatcagaaatattttacttaatatcaatggtgcaactgatttaagactaccttcgattgttgttattggttctcaaagttcaggtaaatcgtccgttttagaaagtattgttggtcaagaatttttaccaaaaggttcgaatatggttactagaaggccaatagagttaactcttgtgaatgatccctcaagtgcatctgaaattgcagaatttccagctttgaaaatgtttaacatgacagattttcaacaagttcaaaaagtattggtggacttaaatttagctgttcctcaaagtgaagctgtttctgctgatccaattcaattaaccattaaatcacctcgtgttcctgacttatcattggttgatttacctggttatattcaagtcgaagcagcagatcaacctttaactttaaaaaataaaattagagaagtttgtgataaatatcttgaccaaccaaatataatcttagcaattagtgcagctgatgttgatatggcaaattcgtctgctttgagggctgcaagacgtgcagatcctcgtggtgaaagaacaatcggtattattactaaattagatttagtagaaccggaagttgctcgttcaattttaacaaataaaaaatatcctttaaaaatgggatatgttggtgtaatcactaagataccaaaatctacatcattatttcataagaaaactggtctccaagcttttattgcacaacagaatgcagaaagagcatattttaaagaaaataaagaagtttttgtcggaactaatgttggtacaaagttgttaaaagaggaaattaatcagagttttggaaagatctatgtcagaagctttaaaaccaatgcatcaactggttatgaatgaattagaagaaacaagttataaattcaaagttgaattcaatgatcgtgatttaacttgtgaaaaatatatggcgcaaactattgataatttgaaaatggaaatcaaagaatttggtgaaagatttgggagaccatgaattaagatctttattaagaagtgaattagatcaaaaagttttagatttattagctctaagatactggaacaaatctgaaccttatctttcgaaaaatccaggttctgccgattatgaattcgaggaaccaccaattgccaatctaagtagttccaaaaatgatgatgttttttggcatagaaaacttgatttagcaacagcaaatttaaccaaaattggtgttggtagattatcaactactcttatcacagatgctatattgactgaaattgaagtattaattgatagtaccaacttacgtaataataccatgattaaaaaggctattaaagatgctgcaatatcagttcttaaccaaagatataactcaacagctgaccaagtggaaaattgtattaaaccatttaaatatgaaattcgaagttgaagatagagaatggaatgtgagtaggacacattctgttcaattattaactgaagaagtaaaggaagcacaagaagcttatgattttattaaaaaaacaattggaggaaataaattaaaacaattaatgacctatattgaaaatgaaaataatccagttggtcaaaacattgaacgagagaatatggggtttagccctggaatgttattaagagctcgtgaagctttgtttttgagggatagagtgtctgttttaaatatgagattgaaaggtttgaagagttcaagttgtaaacataaagaaaataagtttaaatgtcctgaaattttccttgatgtggtcgcagaaaaattaacacaaactgcaatcttgtttttaaatgttgagcttttaagtgatttttactacagtttcccaagagaattagagaaaagattaagctcaaacttgacaactgaaggaaattgaaaattatgccaaacaagatcctaaagttaaacgccatatcgaattacaacaacgtaaagaacttttggaattagcattaagtaaaattgatgatgttgttgccattcaaaaaagaatgtaaaaaaataaatgtttttatagtaaaacgaatttgtgtatagttttatttgtttataataatgtactttgaacccaatatttatattgtttgattagtgatttttctgtcgttggtgttttgtactatcatgtacacaataagataacagttaaagaactatgtaaactagaaatgagatataaataatcaaaaaaggggaaacagataaaatagagttaaaaacgaaaagatcaaatattgaaaaaaaaatatgttattgattaatgatacacatagctaaatgtaaatcattctatcagtaacgttcttgtgaataccagtgcccagtgctttctttgcagcatcaacaggactttgatttcttccaacaggtgcattatgaacaaaacaagttgctctttcacataacaaatccgcataatatgctggtggaacaactctaacggatttagttgctctaccaaatacattacataaattatatgtgactttttgcaaatcatcaggtgaccaatggttttcatcatataacacataataatgacctggaattgcagtaccttgtaatgcttgttgtgattgtaaaaagaaatcatataaacttcttgatgtaacacctttttcaacaactgaacctggtaaaatgttatcttgtgcttgaacatgcaacttctttaccttgtgcattctttgcattcttttcaagtgggaagaatcttgtattatgactctttaaaattgttgtgaaagttaatttaggattaaacttaacacctaacttgtttgagatggttgcaaatgaattcttgactgcagtcacttcttcatccaaaataatatcaaattgacctaaagaaacaccatctctataaaataaaacacattttggtaatttaccaactgatttatagtaagccatgattctttcaacacacatcttagacatttcagtgaatggtttctctcttttgttcttgaactgaaatagaacctgggaaactattgaatttatcatcaatggaacccacaactgcagcaatggatgtaccattagaattgttagttgggtgagtgacatccgcaccaagtaataatgcaggcaagccatcaacaattaacttaccggcatcattcttagataaaacgtggttggcaccacccaacttaatacaagtcttcatggacatcaatgcatacatttgaatatcaaatttaccaaacttcttcttagcaaatttgttttgtaaagtacattgattcagaatacctaaatctctatctaaagcagtcttaacacttgcgtataatagccttttccttttggttcaaaatagttaaaacataatcagtcttagcttgtaatggtttcattacactgacaatatctctggtcaaattttcaactctatcgtaagaaactggtttgataatgaagtttttatcaaatttgacaccgtgtctaccaacttcagcgacaaattcagtacatgcttcttcaatatcagttttttcattatctctcaatggtcttcttgaattttccaagactaagacggttaatttcttaacacccttgacaggatcatagaattgtttattgattaaatcccaagaacctttagctttctcagatttaccatcagcaggtttttcaacaaaagtgattttagtattcttgtattctaagataggtgctggaagaactcttgatgggacaacaactagtttattaccaattctatcagcagaatctttttcaatagattgctttaatttcttcataccatcttgttggaccaaaccagcaataacgtgaggtctatgggtactgaaactcaaaacacctctaacatcagatatttcacctttaaattcttgacctggtaaaaccatacaagcttccataggaacgtaattggaaccacctaaatggatcagtggagcatctggatattttaaagttaatttatatttatccttgaagtactgtgcaacagaagtctgtttaccatcacaatcaaatttatagttattagcagtttcagatctactaatatcaaaaatacctttaggtttagatttgtgacctaaataagttctttgaatctttatacccttaaagaaccatttttgacctaaaatttcaccgtttggaactttctttaaatcagtttcatcaaagtaatcagcaattaaatcggcaacagacattggggtaccatctttattatgagctttaataaatgcaccagcaactggtctaacattaatcataacattgtcaaaggtaggtaaaacagaagcaaaataaccattggcaataaataaacctctttgaaaagattgacacttttcaggacgatcaataaagaaaaatttagatttaccctgccataaaaacatttgaacatttaggaaatcttgtaacctaaaacaacatttaaagcggaaatataagcatttggttcgatatttttcttgtcttgaatcttgacccagttatttaagtcatccatacttaatttgtggatgaattcaactgtacaataaatggttggattttcagtttttttaccctttaacacggtcataacagaagaaggaatgacaccttgataatcttcctggttcgaattcaaaacgaactttttcatcttctttcttgataggtaacggtgcagtggaataaattgcatcagacccattatgggaaagtttaccttttaaaccgttaaatggggctttagttaataatatttcaagtaaatcgttcttaaccttcttcttcgcattaatttcgtcttggaaggtaacattatagtaccaaaatgacaaccctttaacttcaaatttaagatagtttgtaccaatcttagttttgataccaagggtaccataaccaggtcttctaacaatttgatatggatcatcatcttttctatttttctgttcttctgctaacaatgccttaattttaggtaatggatcaaggtcggtaattttagattcatattctggtttaaaattatactctggtttaataacttgagcatcaccgccaccaaatccacctctaccacctctagaaccaccacggccacctcttccaccacctctaccaccggaatcaccgcggcctcctctggcaccaccacgaccaccaccacggcctccacctgagtcaccacggccgcctctactaccaccacggccgccaccacgaccaccacgagaatttcctctattgtcactatataattataaaaatttattagtatttgcatatatgttttgcataaaaatgcttcattttgataacttacgacatattttattgttactaaactatggagatagcgttaacagttgtgaaaagaaggtttaaaaagaagatgaaagaatgagccttcacagcaggcactgctttaatccttttaattagattaaaaacacaaaaaaaactttaaggcaataattgcatcatcatctttgtcttgactctcatccctaaacaggcaacttagccgagattggccgattcaaaaattggcagctcttttctggctttcattatatactggtaatcctaaaaattttatttttttgatttaagttttccttatttattaaacctccacattatactcatgcaacgtgtagagaacaatcgtgtaattagatcttaaaaatatagaaaattgatatgaatgtttaaagttttcaccttagtagatttcaatcaatttttgtcggagatatacaatacttggacaattttgaatagtattatttgaaagagggaagtctgcatatttagaaaagatactggatgtgtttaacaacatttgtttaacatcagttactaattttgaccgtttttcgtgtttttccgaacaatttctcaataaatttactatatgagaaaaaaagatttatcatttattcaataactaatttgaaatcaaagattctgctttcaagaggtttcacactaaactttcgtctttctaatgaatctattagttactcatcgatgacaatgatggtctcaaattatttgtaaatatattaggatataatacactgtattcttatctaataaataataatgaatctcacgtagtttacgtattatgcttaagaaaaattacgttttacagtggatatacgatttagtatatcaaatagttagtatatagagtgttaaacaaaaattgtaaagtttttaaatctggaaagaagataagtgattttttggataaaaaaaacgtttcacaaatcaatcaaactgttaccatttccttgagtgtatgaattttggtattgttggttaccaaatccgtatccagtttcggaaggaacaatacgattggggttagaactggagctagagttagagttaacatttctactgttgatattagcattcgcattggcaccaacagttccattgaaaccagtaaattgattatcaataaatggattattgttgttagatatttgtttaaaacctgtaccttgagagttaataaatgtacctgttttagtaaattgtgctgggattctagcatctcccgtattaccaaatgtatcaagacctgtaccttgagcaagaagttgattaagttcgctatattgttcattcatcttttgacttccagttacattttgtttcataggcgtttgagatgcattttgcaatgcttgaactttttgttgttgttcaagtagtaatctctgctgttcttccagaagtttttgttgttgacgtaattcttcttcccttctctttctagcctcttctgcttctttctcttgttgctgaagtaataagtattgttgttgttgttgttgttgagcaaaaggattgtttgaaccggtttgtaatggaacttgtgcttgcgcttgagcttgagcttgagcttgagctgccatgtgtgccgccatttgttgttggtaaagttgttgttgtaaatatgcttgttgtgcttggcttgggcttctgcttgagctagagcttgggcttgtgcttgttgcattgtaaaatcttgatatccatttgcataaacaggatttccaaacatatcataacctaaaatttgtccctggttttgagcttgtgcttgttgattgtagaaaccgtaaatatcaggtgggtctgattcatttaaatctaataagttttgatttttctttctcatttcctcttcttcaagacttaactgaatagctctttcaagtgattggtcagattggtttcttcttcttaattcttcttcttcagcagtcattctagattcttctaatgcacgttgcaaatcatcatcgtaaatttcatcatcttctggattacgattgtttctctttcttctacgtcctcttgaaccagaagcagaagctgccattcgttcctctttcaatctttcatcatcctgtagcaagctagtcaattccttcgccttgactcttataattgaaccttgatcatttccggtactatctttagtattaaattctcttaatgttttgataatgaagagattatcctttgcccaaataacaacgtcatctgaaccataacgtactaaatactccagtaaagtaagtgctttagcaacatgtctccagttacgtcccttatcattaagacgacgatcaattatatccattacatcctgaaatgaaccatttttataagtgaggtcagccacttgagacatttttgagatagttggactagcagggtcattggatgtacactcacgcacaagaatttgtgctgaggaatacccactagtaacgtttttaatggatcttaaaacagcctttgtggtcatctatttgaatttgttcaacaggttgaatttagataaattaaagcagcagttaaacgccactaaagagtttcactgatagcagactatataattttaattaattaaaattgcttttatcaaaatgtcgcttcatgatttttggccggaggcttaaattcgacttggtattacataagatatatataagacgaaaaagagttcttctccagcttaaaatcgataagattcacaaattgaaaccccatctactgatgaatacatatatatctaaaaccatgtaaataatgattgttaagccaacagtgtatctttaattattcaatcacctttaaccggtttgttttggattggttttacggtgatcaacctttatataaaatttttgactttgataaatatagtgggtaaaaaagaacatacaattctaaagctgccagatatagataaggatataaacctcagatcaaactgggtgtagatatcagatatatattaccaaaagaacacaatcttgctactttcagaatcttttcaagtaaggaaaatggcaattttttcaagtggtactaataaacgagtaaattccgtattcacaacgcccggattgcgtgagctgttaatgagatctatctttgttaacaaaagtctgtcctagattgatgaaaatttgtgagtcgtcagatatataatatagtggattctataaattttttaagatatatatattatatgtaacacagagtttatgtatagtatttattatgagaaaatgaaacaatagctaactttttttggtaatagtgtctttagttttactttcacatccagcacatgtatgtagtgtttcatgtaaaaatacatcacaatcaacacaaaaaatctccttacattgagggcatctggcagcacctgcaccggactcttcaccacatcctaaacatattccaccctctggaaaatcatcaaaggtttgaagtggaaataaatgatgataagaacgagccaagtgtgttgataaaacaagagttaaagaacaacaaggacatactgtgggtagtgtacagaccttgctaccacattgtggacaaacatatccacctgctattgcctgtgaatgacatgcgcataaccctacttctgcactagctcgactaggaaatcccattttaactaatgaaaaaccagatgcactttcagctgctcttttaggtaacagcaagtggtgtgacacactccataaccaattctttaaaatgattttcatctaaggcaacatgatacgtacttttcacgtcaccaaatgaggttttggaacatagttcctcgcaaactgcaactcttgctgttaatccaatgacacgaacagttattctttcttttactagcgcagaaattgttttatgaatattaccaggatctgcactgaataaagcaccaaaaattataacaacttcacgagttgcagtttcattaccaccagccaaaacccctcgagccatgttcaatgcattttgtagactcggttcaccttccggatcaaatcttgttcttaattgacgtaaagcagttatatgttcatgtggactacctcccaattcactaacaatatgtgcaataccatttctcattgccacaattgcaacttgtgaaacagggttttgatcaaaaaactctcccacaaattcaacggcatgttctatcatagctacccctcgtgttggtctaacatccttttcacgcatcactcctgagtaatccaatatcaaaacaactgttctaataatacctctttgaacagggactgttgcacctgcacgacgtcttttacgtgcatcaactaaatctgaaactataccttccaatgaaccacttgcatcctcttggacaatatcccatgaccttcgatattcatcttcccatgcataaccaccaccagcaccttttaatgctgatggtttacctgtctcaatttgttcgtcttcgtcatctgcaactattttttgacttctatttctctttctggtagttgccctcgttctgactccacttttcacaattgcatcatcttcatcaatatccataattaagctgattactatatgtatggaaagaagcgaccgtggttattagaaacacaaaagatagtaagaatatatataatttaagctgtaaaggtcagagagactggaaatcagcaatattttgtttggactattaaaaaattacgtaatattttaagatctataattaaataaattttttcaaaaatttttcatgcattaatttgaaatttattaaacttttatacttattatttatttttaagtgaattatacacttaattgatctttgattaatattatatcacaatggctaaaattagaggtagacgtgtaaagaaatctgaagattctaaaaacgaaaatcaagatattgatcaaaattatcaagatgttcaagataaagaacaaaaagatcaatcaatcgattcatcatcgactgcctttttcggtttagttgattcaaatgaacttacatattttcatcaagcagaacaaacgttaaatttgaatactttttctactccagaagaaagtgaactttttgttaatagtgtattcgaagaagctcgtggtaaagaattaaagttagttactaaccaaatttgttctaaattaatggaaagattagttcttaactcatcacaagcacaagtttatcaattgtatcatgcatttgagggacgtttttatgacttatcaagacaaaaattcagttcccatgttttagaaacatttttagttagatgtgcatgctcttattgaaaaggaaatgttaagcaataacaacaacttgaatgacgaaaatgatgaagatgatgaagatgatgaatgaatttgaagaaatcagtatggaagaaatgttcatcaaaattatttctgaatttctaccacacttaaaacaaatgattaatgatagatatgctactcatgttttacgtattgctttacttgttatgacaggtaaggaacttccatcttcaaccgaatccaactcaattcttcgaagcaaaaaatctaaaattgcacgtaaaatgattgaaatcaaggacagtaaagattatcaaaagaattttcaagttccaacatcattcaaagatgaacttcgtaagctattacagattttcaacaaaaatgagacatgtgaaagtttaagagagttagccattaataaggttacgtcaccagtaattcaattatttattcaactagaaggtattgttgatagagatagaaccatttggagtagtattttcaacggtgataatgaagcagctgatcccaagcaacgtgaaaaggagggagcatttgttgaattatttattaagtgatcaagtgggctcacatttcctacaaaactcaattgaaaatcaaaaggttaaaagtgttgaaagaatttacaactcttatatgaaagaaaaacttgtaaaattggcaaagagagaaactactggtgtctatgttgttgaatgtatgatggcaaagttaaaaagtacccaacaaatggaaattttagatttattagttcctgttatgaatgaattgattgttaataatattgatattggcggttccataattgattgttcagcaagaaatgataattatttgaaagaaagtattattgataagttcatagactttttcaataaaggaaataacaatgatgatttgtttgaaaacattctcaaattatccgaatctactctttttagtacaaaggatgattggccaacatcagaagaaagaagaagggctcttttctttgaaaagttaattgaatacgatcaagagaagatcttacatattgccgttactaaaatattagaatttgatgaagcaacattaatcaagttttgtaaacatggggtcttttctcatataattgaaaatgtacttaaattacgtgaatcacttaacatagttgaaagaaagacattacttaataaattaattggtcatgaatgttgcaatattgttgagttagcatgtaactctactgcatctcatattattgatgccttatggatgtttacatttaaacttaatatgttcaaagaacgtattgctcgtacgttactttcaaaattccgaagttgttaaaagtacaatatatggtcgtatggtatggaaaaactggaatatggaattatacactcgtaaatttaatgattggaaatggattgtcaaggaggaagaacagaagtacgaagaggaaaaacaagctaaaaagaaggaattagaagagagtaacagttctttcaatgctagtggtaaaagaggacgccaaggagataatgtaaactcggacggtaagcctaaacgtagaagacgttaagctgagatatatatatatatatatatagtattttcagaataatacttgttcttgaaccatttcttgaatgatcatttcttaacatggggaaattagaatcttctgatgatcttggtaaaacaactaatttttttactgttattttaccataattatttgattttggtgaattattattaacttctgaaactggtaattctttaatttcagaatccccttcatattcaaaatcactatatatcgatatttaaccactaatagatagatactattgttcttaatcgaatcataataatatatacaactttgtttgttactgcttgttaccgccctgtagtccatggattataccaagagcttccccgttttttttcatggggtgcgttttgccacagccaaatagtgagcatgaaacatgaaacaagatttgaaacaccttttcgcgggtgaaacaaaaaacatcttgtcataaaacaaccctcttctagggcctcactgaagccagttttccgctttttgcacttaaaattttctatcatagtaaaattggagcagatcttgtgggtgcctcatccgcatttggcctcatccctagatacattctctgtactctgtattaactacatatttcttttttcttttaattatcctttggcctcttgactacattgattactttctttttctctgttatatacatccattagctgccaagcactctgaaccagtactattgaatatcaaaaaaaattggggaatcaatcatttattcaagttattgaataaaaacaaacaataaaaacaattaagttcaaattttttctttgaaaactacacctgattaacaatatcaaatctgttgtgtaagtttaactaatatattcatatcattattatatataatcaaagaaactattaaagaccctattaaaaaatagctaaacgaaaaaatataaataaacaaaatatacacaaatgaccgctttaactgcaaaatctgaacaatacaaagaagctaacggcagtgtcaaaaaagaaccattagaagattctgacacgccaaatctaggtgaagttatcccagaagtccccaaggttgatgaatctaaaataaacaacaataattctcaaatagagaattccgataatagtactgaaaacgatttatctgaagaagaatcacaaaaatttatcaactcccttcagctgattaaagatcttgatttattcttggcaactgccccagtcaattggcatgaaaatcaagtaattagacgttatttcttaaacaaagaagaaggttttgtttcatgtgtctactggaataacttatattttattacgggaacagatattgtccggtgtattgcatataaaatgtgccatattggtcgtgaaattgttgataggaaaaaatttgaagaaggtgttttttcagatttaagagctttaaagtgtggtactcatgcaatacttgaaaactcaagatcgccatttttgaagtttcttcacagaaatcaatgtctcagaactcaaaagaagcaaaaagtgttcttttggtttagtgttcctcacacaaagttgtttactgatttcttagaaagagatttaaaaagagaattatctaatcaaccagccacaacaaaatcaatcaatggaatgttcaacacattcaaatatgatcaatcaagacctattttagaacagctttctgatcatttttcatctattttatcatttaatgtgagccatttattgctgaaaacaaatccgattttatcaactaatccagagactatcaaacctgaacaacagcagcatgttacccaatctaatcataatattccgcaagtggtacctcaacaacaaccacacgcccagttactgtacccacagcaatcatactcaaatatttcagcaactcgtgatcaacagcggcaagtaaatattggctctgctggagatgatatggttagaacacagcattccaaagaacaattacaaaataccaatcaaaataatattcaaattacggacgattttcctttagattttattgatgctgaaccaaattatttgaatggttataacaattctgagaatccagttcgttttaatggtaagctaagcttcagtcaatcatatatttttgatgatggtaaaatgtcaccttctagaggctcacaaattcaatatgttgtgggtgataatatacaaccttttgatcaaagtgattctctttcgtatggttctattaatcacacgttactgtccgcaacatatcaaccgtactctaatcaacaaatgtatattttatcaggtcttccctctgcaattgatccaacttctactttgaacttgcaacaaagccaatcacaatctgggagtatatcccaactcatacaacttccagtacaacatactggtatgaccaattcacctactacgatagtgggaaacaatgaaagccatcaaggatctatagatggatttaattttcaaggaaatgatcaaaatctaaaaatgatgccccaatatattaaatctcaatctccttctttaagtgggaactttatgaattttccatcttcaggttacattcctgtttatatgccactgcctacagcatcatcaaaggataatattctctttcataatgattctgtagaagttgaaaatatcaatgaatccatggaaaataaaaatggtggtgtaaattcagtggaaattaatgaatctgcaggccagaaagcggctactgagttgaaagagatggaacctaaagaaaaggataatgaaaccagtgataaaatgaactcaacacaaaaaccagattatatgatgttatctatgccatcagctatgtcaaataattttggtagagtcattgtaggtggacaattgtttactcctggtaatttaggtatggaatataatgttgataattatgctttaggttctggtgttggaatttctcctgttattgggtttaataatggaatgcttgtctgcaatccagtatcaatctgcaaataaaccaaattttgagataccaaacgatcgttatgaacacagagatagcaatgaagatactgttttgaagaataaagacagtaatggtattcaaaatattgatggctccaaagttactaaaccaagaactgcagtaaagaagaaatttttaaatccaacacttcagcgtttacagttggaaagttacttggatgagaatgaagatccagtagaaagtgatgagaatgaagataaaatccctattattgaacccaccaaacttgttgttgaagattctatgaacaactagaggtttatttacagttactttattttaaattttgtacttctatatcgtattattttaatatttcaattaaacatttaaatttcactactatatcggtttattaatataaaatttaacaaaaatgtcaattattgtaagtttgcttgactattatacatttctacaatttggtcactacttgtcgcatcttcagttgatttatcatctctaatctggataaatcttggaaatcttaaggagacacctttttcaccatcacctaagtaagttgcaccacacttgtaaattggtgaagtagtcaaatcagcgaccttaacttcaaacaaagtagttggctcaaaccatacatcaggtaccgcatttgagttgtttttatcatacacataagatgacttaggtgattttatttcggttggtttaagaagagtgtgtaatttttgtaaaagttcttcactgaaaccagttccaattttacaaattgtttcatattctccactatcttggttataacctgctaataaaaaaccaccataccaaccagtacgttttcctttacctatataaccaccaattactactaaatcaagtgaatctccaacaccctctaaataatcttttttaagtttcaaccagtttcttgatcttttagatggttcataataagaattcacttccgtctaaagttttaatcatcaaaccttcacatgcatcattgacagattcatctaggaatttggtaattttttcaacattgtctgtatccatcttagttgcaaactgtaattttcctggtatctctttcaaattgttgtaaagatattttcttctttcctctaaaggtttttgaatcaaagattcgccattgtaaaataaaatgtcaaatggaaataaacaaacttgaacttgaatgtccttttcttgaacatcttttctctttctagtagataaaatttgaaaaggtaagattttattgtttacacctatcccaagcaacacattcacagtcaagaatcaaacttttaatcgtagaatttttagccttaagtgcattcacaacaggaatcaaatcgggatatctttcagtcatattttctgaatttctagaatagatgaacatttttccatcttctgaaagatgaagttgtgccctttcaccatcatatttatattcacatgtaaatcttttaccctgtaatgtatctagaatttcactgatacttttagttggtttagccaacatgggttttaaaggaacacttggacttaactctgcatgatcacataaattcaaaatcccatgtttcatagacaattgaatcaaaatttcataatttggtaatctagagtactgcttctttaaattgatcttcagcttgtacaatcaaatcagagtttgccgttttgtttttttgttctagttgccactcaacaattgctttggataaagctacaatgacactcttttcaccaaaattaattcttaatttcccttccaatgacctcattaaaaatttggcttcaacaccttcacaagcagttaacaatttgttgataacactgacttttttactttgtgcgttcgttccttcaaactttgcaatttattaagtcctttccagacttcaagaactgttaatcttttaggcttaaacatgaccttttgtttcgacctacttttttgagcaacaacaccaatatcaccttctacgtgataatcttttctaagttgggcaagttcacgaccggtaccttgggctaaagctttcaaaagtaatgtttcacctagccccaactctaaacctggttcgtaatctgggccgagtcgattgaccatcaagtatgtaaccattgttaaatctcttattttatcttcaatgtcactgaaatcagtaaaatgtaaaacttcatgaaaaaatctacatgcagaagcaacgttcttcaatcttccactttcgttttcaagctcttcaaatgtagaagttaacatcgagtacataattgggttcgtagatgttttatgttttgctgcattcttttcatcaatcttcaataatttttttgcttcttcgatttcattaacctttttgtgttgttcaagatcattatctatttcaaccagagttttcggtttcttaacttttggtgattctgatggatcttgactcttctctcttacttcttccaaagaagaactcaaacttgagactggtcttttcttagtcgtttcatcatttttactaattggagcatttttacttgaaaaaaatctcattaatgttgattgtcctgactttgagctcatgttgagtggatttagttgatataatgtagaagttgaatttggtgctaaaatatatttgttgatgtttgctttcaaaattagtggtctgtacctttttatcaaaaatatttgcatcccacaaaacaccctcttcaaactgtctaattttattgataatgaactaaaattcattcaacatgaaaatattggcaattaatttgctgtcacgtaaattttaccgctgacgcgtttacaaatcaaaatctaaggcagccgattatattacaaaatataattgaaataattaatttattattgataacttaaaaaactttatataaacaggtctaactaaacaccttaaaaactcatatttgaatgttcttaccacaaaacatggcaaacagaataaataaaaatgttataaatgtagaaaactttgaaaaatgaaaaaaaaaaagaatttaaaataaaatgaagtgaaaatagaattgaaagcattttagaatgaaagaaagaaaatctttaaacaagatttgattacatagaatcattatttagattcatatttttcccagttgtttaagatttccttaattttttcggaaccagttaaatcgtagacatcttggaagtattctttagttaattcgaatggcttagcagtcaagtttggaatatatttaccgattaatgaagctggtttaaccgcagacattgggattttcttttctaagaatctcttgaatggagtgacacctgattttaagtaagaagaatggaaaggaacggagatacctcttaatggaatacatgcaaaacctctttcaagttcaattggttgtggtttggctaatgatttctttgaaacttcatcaacaatctcagataagtgttcagcaactttttctaatggcatcatttcttgtaacttaacaatatcaatcttttgtaatttgaaaacattcaaagtgttagttaaagtatcaagagcccttaaatcaccagcagtaacatattgttggttttcaacattgtaattgacaatttctaataaccaaccagtttgtttgctgatgtgatcaacaacatatcttaaagcagcatcagtgaaagttggaccaaccctagatgggttaacagcacacataccataattagatcttcctaatgcatctcttggaactgcaacttgcatagtcatacctctatagaaaacgacatcaactaatgattcgattggcataacatcagccagtgaagataatgctgaatattcacctaatgagtgaccagcaaacattgattcagctggaaccagacccttagatttcatatcttcaaaggcagctttttccattaaagttaaagcaggttgagtaaattgagtagctgctaataaaccagatggagatctgaaagtatattcggaggtattttcatcaatttctttgaaaatcttttcagaaactaaagaaccatcttcggcaacagtttcgaacatcattgagatataattttctctaatttctctaccctttggaccaccaaagtgaacggttaactcatttggattgttcttaacaatatctaaaatggaaaaaccataagtagcgactaagtgaacatcagctctatcccagacagctttagcaacatcagatgagttgtataagtccatacccataccttgttcctgagaaccttgaccagtgaatacaaaagtggagactggttgttcaatttcagcttcaccagctaaaacaacttcatcagtagagatcttctttgtttcaatcttaataatctttctaccattgatcataccaatgtgttctaatctagtggttaactcatcatttggtaaaaccataccagtgaaattggctttgtaagcaacaactcttggtgcaacagcatcagcagcatacatttcaaccaatgatctgacagaggcagatgagtacataccgtgggtaatagtacctggtaagtcagcataagcagcaaaaattttgttaacgtgaattggattgtaatcacctgaaacagcagcataggtttcattagtagttggagctttagttttcaatgcaacggctaatggaattgggttttcaaataataatggctgttcaattggagtaccatttctagttaagtaatcaataactgggttaccataagagaaagcagcattatattcaatttctgcaaccttcttaatttctttagttggagattcgtaataaacattaccagtagtttcgacattagagtaaacattagcagatttaaatttgtaaacagatttcaatctgaaaattaaagttttgtttaataattcaacaccttcttcaatatggaaccattcttttgattttaagacagcagcatccttagcagaagcaataataacttgtgctggagtttcttcagttttttcaaaggtgttttcgaaatcggaatattcacctctgtaaaagaatgcagaagtaaccttcataacagcctttgaatccttgtaaattgtaccaacaacttcaacggttttaccagttggtccattgataacagaaacaatttcagcatcagaagaaaccttatctccgaccttcaataaatcagcacctggaactaaactgtaagcattagataaatgaactaattttaagatatcaccatcaacacattttggaaagatagccttcatgattgctttccaaccaataacaatagcaaaatccattggagctaattgatctctaccttcccttggaacgaaatattcacacgagttaccaactgaatgagttaattgggatatatctttggagttaatttccattgagccaccatcaatagtagatgcaacatcaaagtctaagtcaatctttgagttagaaccaaaccaaagcttccagtagaattccttgattctttcatttctaccttccataatttcagcaattggagcaaaaccatcagcagtgttgtaagtgtagaataattctaatgaaacaggagaaccatcagcagttcttgattcaattaattttaagttgatagtgttaccagaaattgaaacattaacaacttctctttgtttacccttaataatttgggataatgaaataacagtcttggattcatcagacatgtttgaaatagtaacaacagtattcttagatggtgctaaaactttcttagctgggttagcaacatgattgtaaccttgaacaaaaagtgcagatgaaacaaaagcgtgtctccagttgaattttttaccagctaataatgagaaccattcatcagcatttggaacctttgaaccaattgtgtaagtaacagcatcagcagattcggtaacagaaacactagcaacagaatttggcttagaaacagacttagaactgaagtattcaacaactggaatagatgaagcatcattattatattcttcctttaataacttttcaatgtgaccatcatgaataccatccataatttccttgattggttcatcaaccttgttaatgaattgagcggcaactggaccgcataagacacaagttctttgaacatcttcatcaacaacagcttctaaatgttcagattgccataaggaatccttcttgaagaagaattcgaatttttcgtttaagattggaataaatggaactggtttttggaatgggtttaaacataaaccaataaagaaatcaacatcttcagcattaattaattgagtctttgcctgtggatacttcttaaaaaggacatctaaaactggagctggagtgtttaattcagtgaagctttgaacaacggaaacagttgcagtagttgcaaatctttcttcgattcttctaataaatttaccagtgaaatctcttaatgatgggtcaatccattgatttaatctgttgataaataataattcaacacatctaacaacgatttgttcataagtcatatccttaacatcacaaacaccttcatcattcttaccaaaccaaggtttttggaaatcagcatttaatttaccaataatgtaatctttcttcttttctaaagcttcaaccattttgttctttggtaatgataaaatagtatcatcaatttctttccagaatttaacagctctagttgcaattttatgaattggttcacccatttctgatttaacagttaaaataccaccagttggctttttataagtttgttcccattggttatctggaacaccaggacatgaagcaattaatgcctttgccttttcggaagttaaagcttccttagctgccataactcttgagccaaataagaaaccatcaaatggcattggaggataattaaatgattttgaccattcaccagttaaatatggataagtatcttcagcagaaccgaaacctgaacctgcaactaaaataatatttgaacatcttctaatcttagaatacatttgtaaaattgattgatggaaatcttcgaaagaatggtgaccaccacctctaccacctgtccattgaacaacaattgggaaatggggatatgccttagcaattgaaatacattgtccaatagcatcaatagaacctggttttaaacctaagtaagttaaaccgagagtttcaatatattcacctgcaatttctaatgatggaacaccagcaccaattgtaagagattgaagagggaaacccttttgtcttaagtttctaatcattggaattgcccattgtaacattcttgggttaacataaagtaaattgataccaataccataacctggtttaactttttcagcaacttcagttaaagcttcaattaaagtatcttctttgaagtaaccaccacctccaagttcaatggtataaccagcattaagagttgcagcaacaaatgatggagaaacagtagttggagtcatacctggaaccattaatggtgctcttgacaataatcttgaaaatttagtatcaacataaactttaccatctttatttttaattaattttggtttgaattcgtttaaccaatcttgagcaaagattaatgaggattcattaacatcaaataattcttgcttaaaaccgtaatcaacatcagcatttgcggcttgtaaaacaccggcaacgataattctagcaccagtaccttctttgtttttatgagttaaaacacctaaaccggagacaccacctggaccaaaatcaattaaatgagttgccttaaagtcagttgctaattcccagttaacagttaaagtgttaatacattcaacaattctagcggctaatgaaccggagtatgaacgtaaatctttaccatcataagtatcataaacaggaattgagattttagattgttcaaattctaaacctgagtttttgaaatcttctaaaatcaatggaattgcagattctaataatttggaatggaaaggagaatgaattggtaagaatcttgaagagaattttaatcttctttgagaatatggaactcttgattgttctaagccggatggagcctttgcatttcttaagtttaagttaaaaccatataatgattctggagggcctgaaacaacaacatttctagcaccattaataagtgaaattttaatatgtttttcagatggtaaatgatggttagtttgttcaacaaatgtttcaacttcagcaactgataaatctctaacagataacattggacctggtttaccttcaccattttcttcagcatctttaaccattgatggggcaagtgaggttaatggataaacttgtaaacatctaacagataagtagaataataattcaactgctttcaaagcttcaacttcaaatgattcccaagaatcagaggatgcaacaactaatgaagtaactaaaccttgagagtgaccagtagtaccctttaagtttgctttgaattgacctggggttaaacctaaagttttacaagtaataatatagtgacataattgaataacacaaattaaaggacaagaaactggaattgataataagttatcgacacttggggtttgagatggattctttaaccagttaatgaaatcaaaaccatcagtgtaaattctatcaatatcatgagttgaggagattaaatcttgaactttttgttgaactttaaataagaaatcagagactaaaccattataaacttggtaaatttctcttaattcttcaaaataatcatcggtattaccttgaccaccaaagatagcataaatgagtgctttttcatcagcagcagcattaaataaagcagatgaaacattagaacttgaaatttctgatttagcaaaaactttagcatcgaaatagtttttaacaacattgtagttgattttttctaaagtagttggatattcttcagaagctaataattgagaagcgaaagtgtgaatatcagttgattgtaaatatctattttcaaaatctgataagattaatttagttgcttgagatttttcagcgtctgaatagtttgagttaacaacataacctaaaaatttagttaataattcagatttagaagaaggttcattatcatcagcaaaaccttcagttggttgtggtaaagtttttttgaaatctgaagtaagttgttgatagaataaatatgaatctgatggaattaatatagtagtttccaatgaaccatgtgataaacttaaaggtctattaattgaagccattcttttaagttttgtatttattatgagatagttttttctatgctatataatatatgatttgttaaatattgttaatgttagtatttcatattcaaaattggagagatgatgagatgatgagatcaattgaaaaatcaaatgcggaaaaatgataatctgttaaaaaattcacgtaattaaagaatccaacataaattcaaaaaaatgtacttgacacgaaattgtgtctcacatggagtgacaagatgaaatttttaacaaatggatccataattacgtaagattttaacgaatgtaacatttgattaaatgtgaatatagagagtgaatgcatatgataattaattgaaatcattggtttgaaataaactcatgtttgctgtatacttacaattatctaattgatttaaaatgaatataatagagtttgaaatattttttaattgaatatttagatgtggtaaatagtattcaattggaaaaaatatatgtagtattattaatataaattttaattgctttgttaattaataataatgttaataataagattcaaattttcaatatctaaaagtggtaagtaataaagaaaagattgatttatttgaaagaatggaaaataaatgaattgtcttgttttataaaaatagaacagagattgatggagcttaatataattaaagaaccttgataactgaaagagagataaaaatttaaaatgaaaatatcaaatacgaaatatcaaatatcaaatatcaaatgatgagcaccaagtaatttaaaagaattgtagaaaacaaagaaaaagtgttggaaactagatgtaaattacgttaaaatgaagttaaggtatatagtttgaaatacctgaaaatagctgaatttctggaaatacaatgcgatgagccacttgtccatagtgaaattgaaattattgttgagtaaacctaaccaacattttttatggttacgtaatagtattataattttgaaaatctggctgcgtcgatgcgtcttttggcatttgaaaaaaaagtttggttgcgtcgataggactgttgtgttttcactttttttgccatgcatgtcttgtgaaaaaaaaaatttttgtcaaggtgcaattcatcttagtaatgtagaagttttatcatgaattatgtattataccagttgattagtttatttttttaatctgcatcaccaacttaataacaactaatatacaatgtctagagaaggttttgttccaccaactgctgctaatttaggtaatgctgccagtggtatgcaatcaattaaaaattatggtgttaaatatgtttgtgctcaatgtgcagttaattttaccctttcaccaaaagaacctgttagatgtaaagaatgtggtcatagagttttatataaggctagaactaagagaatggttcaatttgaagctcgttaaatcaataaaataataaatttgtttcctttcttattaacactttctttcccttattcatattacatttatcacatcactccgacttagagttttatacaaggcattttccaagatatcattcaatctgagattgataaaattaataataataggatcaactttgattacttattatttttttttatctcatctcatatagaaatcatttcttctgttataatattatactcctgtatatatcaactttcctatatagattaaaaaattctcttttaagccagctattagacttacagttccatcataataaataatatattaagatgacgattctaaatgtaaatcatctgaaaagttaagccgcgtggtcgatgggtctatgaaatgaaattctattatcaccatagtattatgaatcttctagaaacgtgcacttatctatcattgaatgggctgtgcttaaacattatcatatatcgatgaactaactttaagaattccgttagttgccccattgggtaaataaactcaagtttaattatttcgttgaaatggccccttagtatattttaaagtttacagtatttcactcttttattttcaaatttcaattattaacctatcgttactataattcaataattctaataagttttagtctatattatttataatgtctgtttcggaaacagttgaaactttaatagagtcaacaacttcaataatttctactgaatcgaatgttgcaattcaaccattaataaattcaactcattcaaatataatatcaacatatacatctacatttacattcgatgctttgaaaccaatatcttttctattttggatgatgattaaattctttacatttatgttatattcaactgcttatatgattcataaaattatttacttgatattattcaaaacttttgaaattacattctctgcaaattccttattctatattattttattgatatcaactcccttatatgcttatttccgttatacttatttaactgtttattcaagactaccaaaagattcgaaaagacaaaatccaattttagatactttcctaaattcaacaaatgaatcagattccggtcaactgaaatcttatttagatcaatttttatctgcaattaaaatctttggttacttagatgctcctgttttccatgaattaactaaatccttgcaaactcaaaaaattgattcaggtgaaataatcttccttgatgaattctcgggtttttctatttgcgttgaaggtgaaattcaggtttattctaaaattggtcctgctactgattctttcaaaaatcaaattaatcccctatttataagaaatgatgatcataatgttgttattgttgatggaataaaatatcaattattaaatataattaaaagtggtgctccattgtcttcatttattgctgttttaaatattttaacagattctcaaaggactttatcaagtataacgccaactcctaattttttcaatcagaaaaacaacttaccttcgatcccttccgataatttctccctagatccaactgcatttgctgatagtcctcaatcaaaggattctaattataatattatcagtaataaaatgaaaaattcgcctgaattgattgcaatacccaaaaattcttgtacaatttcaacaatccctaaggaatcatttgttagaattgcttcaaaattcccaaaggatacatctcatattattcaaatgattttaactaaattgtacagagtcacatttcaaactgctcataatttcttagatttaacccctaatatttttcagactgaaattaatctgaatcaacatacaaaatcttttgaaagaaaattacctagatatttacataatttagcaattgattatattaatagacaagaacgtagtgattcttcaagttcaaattataatagtagtaatacaggtaatcaaacatccaaaagttcaagaattaaaaaatcttcatataacttaaaacctagaagaaaattcaattctaacaaatataaatcaactaattattcaaatttaagtaactctaatacttccttgaataatttaaattcaaagttgaatactgaaagttcatattattcatcaaattctaatcatttggatgtattcacctcagaaggtgatgatagtgtgtatttaactgacactcctagtttagatcttgataattcaccatataccaataactcaagtacgaacgttagtataagtacttcaaatcttactaatagtactaatacgactaaaaaatcaagaaattacaaattcaattaaaagagttccatttctaagaaataaatcaagaaattttgtacttgattcaaaatctgatacaaatcctggtgatttactttctaacgttgctttacctagaaactcagaagtgaattttagaaataatttatcaaaggcagatttgaatgaaattattgatagaacttttagtgctgatgataatgatgaagaaactgaagaatcaacactacgtgctgcattagctgagagaatttcttcaatgattggacttgataaaaataacttcccaattgaatccctgaatggtagatcaaattctaatattgattcaatagttaattctccttcacttcatagtaattctgttcccggtataagatatgtcactcctgtgggtgaaagtgctccatcttcatcatcaaaaaacagaaaacttagaacttattcaacgaccagtatggatgctgcaggtgttacacaataacaattctaataataataatcgaagtgggagtgttaccgcaaacaatgtgaactcagatgaatcgtgttcaataaattcaaaagtttataaatcatttgttaattttgataatgttaaaggagaatttgctgatgatattaaatttatgaaaattaaaaaaggtaccaaaattatcaaagaaaaagaacaaactcctggtatattttacgttattgatggctcatttgatgttagttattggaaaagagaaagcgcatttaacacaaattatatcgatgatcctgaaaatgaaagaactttgaaggataatatggtcgaagaatatttatacacagttggggaaggtgatattgcaggttatttaggtactttaattggatctaaatcatttgttgacgttgcagctacaactgattcgtatgttgcatttctttcacgtgaattttttgaatatttaactgaacgttatccgagattagagttgaatattgcacagttattgttgaaagtattggataaaaaactttatttaactgattatgcattggaatgggttcattcttcggctggaaatgttttatataaacagtctgaccctgccaatggtatctatattgtattaaatggtagatttcgtgcactctctaaaaataaagataataccaattacgttatactgggtgaatatggtcaaggtgaatcaatgggagaaatagaggtgttaactaaaagtaaaagaataagtacagttgtttcaattagagatagtgaacttgcaagaatacctcgtacattatttgagattattgcattaagtaatccttcaataatggtcaatatttcaagaattgttgccaatagagttaaaaatgatggtgctatggtagcttcacaatcacatgtttcagcaactgcatcaactagaattaaagatgaaccaatgattcaaagcttcaataattatagaacaattacattactgcctgttacttatgatacgattccattagttgaatttggtgaaaatttagcaaattccttagaaaaggttggtaaatctgttaaaatattaaatcaaagtgccgcattaagtaatttgggtaaatatgcatttgataaacttgctaaactgaaacaaagtggttatttttctgaattagaagaaaaatatgacattgttatatatttatgtgattctgttgttaattcaaattggacccaaacgtgtattcaacaaggtgattgtattttattactagccgacagtatgctgaaacctgatgttggcgaatttgaaagactattggttaaaacaaaaacaacctctagaacagaacttgttttattacaccctgatagacatattgaaccaggttcaactcatcaatggttgaaaaatagaatttgggttcatgcacatcatcatattcaaatggaatgcaaaaattctcatggagatcatactgaaaatataaaagtttatgatacagatacattaactaaatttggtaagaaattaactgataatttgatgttcaagatggaaaatattgtcaacaataatgatttttttcaatttttaaagcaaaccaaacaagattttaaatctcaaaaatactatcaaccattacaggaacataaagatgattttatgagattagcaagaattttaactgggcaagcaataggtttagttttaggtggtggtggtgcaagaggtattagtcatgttggtgttattaaagcattagaagatagtggaattccagttgatatgattggtggtacatctataggagcctttgttgggggtttatatgcaaaagattatgattttgtccctgtctatgtccgtgcaaaggcgtttgctggtagaatgtcatcgttatggagatcattactggatttaacgattccattaacatcatacttaactggtcatgaattcaatagaggaatctggaaagcgtttggtgattccagaattgaggacttctggattaaatattacacaaattcaaccaatttaacagattcagttatggaggttcacacaagtggatatgcatggagatatattagagcatcaatgacattagcatcattgttacctccattgaccgatgatgggaatatgttactggatggtggttatatagataatttaacagtttcagaaatgcaaagaagaggcgctaaacatattatagctgttgatgttggttctgttgatgatcgtagtccaatgaaatatggaaactcattgagtggttggtgggttttagtgaatagattgaatcctttcagtgttcatgcaaatgttccaacaatggctgatatacaaatgagattagcttatgttgcaagtgtcaatgctttggaaaatgcaaagaatagtgaaggatgctcatatttgaggccgccaatagaagaatatgcaactttagcatttggtagatttgaagaaatttatgaagttggtttgaaatatggtacggagaagatttctgaaatatttacagattggaatatgaataccaaaaagaaacaatttttacctggtagaagaagtagaagaagatattccatgtagtttatagattcgttttttataactttttttagataatatacagaattctatacgatattcattaaactattagtaaatgtgtttatttggataaaatcgtaagctaagatcttgatttttttgatgtccactaaaatctataagttttcaccatcagtaactaatataacagaatcacctctaataaaaacaagagtatgatttttttgttcagatgtaagttttccttcttcctctgtcagactaaaaatggtttcgactgcatcgcccaatacgatgttacaatgagaatcgtatccatgtaatttaccaaccatttcacgatatcctgaaagtttcacaaaaatcttttcatctaaattttgttttagtaagtcaagtggttcggcaaccgtcattattctatatttggttgtagatgtgataagatgtggtgtttaccccgtaaatatgtaatgcctataagaacaatgttccgaaaccttgacctcttgtccttcaatgtactgaggtcaattaaattttgacaatcctcaatttttagcatttctaattttataatcattggtagtaattttcatgctttcaaacattacaatacaaatatcctaacacttcattctttcttctacttccactatagatatcaagaacatatagaattgatattcaaatatttcttgattaaaacctaaaccccctgtatatatacaactccctatatataatgaattcagatgaggaacagttgaaattccactgtttgggtggaggtaatgaagttgggcgttcatgtcatatattagaatataaaggtaaggtagtgatgttagatgctggtgttcatcctgcctatactggattagaatcattacccttttatgatgattttgatttgtccaaagtagatgttttacttattagtcactttcatttagatcatgcagcgtctttgccgtatgttatgcaacatactaattttaaaggtagagtctttatgacataccctacaaaagccatttataaatggttattgaatgattttgtccgtgttactaatattgcagaagatattgataatacgggtgatcgtgctaatagtttcctctatactaatgaggacttaaatgattcttttgataaaattgaagctgttgattatcattcaactattgaagttgatggtatcaaatttactgcctatcatgcagggcacgttttgggtgctgcaatgtttttcattgaaattggtggtttgaagatactatttactggtgattattcacgtgaagaagatagacatttaagttcagctgaagttccacattcaaaacctgatcttttgattacagaagctacctttggtactgcaactcatattccaagattagaaagagaacataaattaactaagatgatacattctacaattcaacaaggtggtcgttgtttattacctgtttttgctttaggtagagcacaagaaattttgttaattttagatgaatattggcaacagcataaagatcttcagaaaattccaatttattacgcttcagatttagcaaaaagatgcatggctgtttatcaaagatatatctatatgatgaatgaatcaattagaaagaaaatggcggattctaatacgaatccattttttttcaaatatatcaaaagtatagccggtatggatagaatgaaagattcaaatccttgtgttattttagcatctcctggtatgttacaaagtggtttatcaagacgaattttagaaaaatggtctccagatccaagaaattcagttattatgactggttattccgttgatggaacattggctaagaaccttttacgtgaaccaaatgagattccatcgatgaataatcctgaagttatggttccaagaagaataaatgttgaagaaatctcatttgctgcccatgttgattttgaacaaaatgctgaattcattgacttagttagtcctaaaactatagtgttggttcatggtgagtctaatccaatgggtagactaaaatctgcgttactttcaaaataccaaaaattaaaatcaactgaagatgaaattaaaatctataatcctagaaacagtacaatcttatcactagaattcaaggctcaaaaagttgcaaaagttgttggaaaacttgcatccgctattactgaagataaagaacaattagagggtgttttagtccagaaaaattttgatatcaatttaatgagtgttgatgatattaaagaatttacaacattaacaaccacatcaataacacaaaaacaattactacgttgtaatgctaatagaagtattgtccattggcaattctctcaaatgtttggctcagtaaatgtactgttagattcagaggatgtatatgaatttgaaatcatggattgtgttaaagtgagacataatgacaaacaatatattgcatacgttgaatgggaatgtggtgcgatggaagacacaattgcagattcggcaattgcaattttgttaagttgtgattcattgcctgctagtgtgaaacttacatctaaaagttgttcccacaatcactctgaacatgatcataatcatgataatcaagacataagtgagcaaaagattaaggaggaactaaaaacggaagatgaggactcaaagataaaattcaaggaagaaaatcttgatggaaatatcaaacaagagatcaaggacgaaataaaggaagaaagtggtgatattgttaaacaagaaccctctgatggtcttacggatataaaagttgaaaaaaccctatttaaaataacggaaggtcatgccaatgtcacagaagaaactaaattagctagaatcatacaaattttagaagtacagtttggtgattctttaactagcaatttggaaggagatgaaaaatctggtgtcataaaaattggtaagaatgaagctacaattaattataatgactttacagttgtatgtaagtcaggtgttctgaagggaaggattgaaggaattctatcacgtggtctggagttggtatcttcatttaaaaaatagacaatctgtataatcgaactgtataaaaatttaattcggtggtataactgagcctccaaaatagaaaattcaaacttatctctcttcaaagtctttgttggaaagctattttgatggctattttttattgaaacaagtgtatgtgggtgtaagcgtaggtctatgtatccaaaagttcatttttttcagtgctattttttacctttttgaacatccaaaacaaattcaaaaatataaaaatatatgacaagttgtaaatttttgaacttccatagttaattttaaaagagtcttttttgactgatttcatcaatcttttaaacatgaaacactacaatcttaatttaatttaagaatttcacacaacttccaattgtattctgctttaccacactttgacgagtagtaaaacactaaattttacctgacaggacttctaccacaacaacttatcatgtcgcattattacaacaacaatttgtgtcgcatcaaagatgacataccccatattcttaaagattgatttgttagaacgtgaataataaattaattttacaaaatataaattatacaagactatatatcaccaacagtggatatttgatcaaagataaaatcatgtttatcaacccaatcacaccctgtatcacttgttggacttaatggatctaaaaattcgtaatcttgaggttcaggagggaatccaagaactgaatctgaattaccattaccacccattccattaactaaatcagcaaattctaacataaagttattattactgttattgagagtattgttcaaattatcaatgttattatgtatttgtgtttcgtcgggtatatttaatgaattttgtgtattcgatatatgatttgttaaatttgaattctctgtaggtttataattttgctcattttttgagatcatgtacttagataagaatgttttgttttcattttgatcagatggatcagatgataaggttgcctctgttgattcaattttaattggtgcttcatcatgaacagttgtttgagttgttattgttgccaaattaaatcctaaacctaaaataccagcttgaacttttttatataatttaggactaactcttaataatgtctctgcaatatgtgtgattaattttgcagataatgaccaatgtctagaaatttgtaacgttgaaccaatctcaagtttgatatattcagtataaacatcaagttcagatgctgaaatttgtttatctccttcatctaaattttccaacattgataaatttgattcaatccaagcatatgcacttaaatgaacaagacatgaaaatgccaaagcacatgctaagaatggagttcttttacatgtttgtgaaggatcagtatctaataaagccttaactaagaaatttgctgagtcaattgtttttcttgtctctataattttcctagaatcggatgcattttgagcttctttattatttaaggcaacacaaggatcatcgacacccttttcgtcagtacatctaggatgtttggaaacatcttccctccaaagataagaaaatggtctatatgtgaaaattctagcatagtttatcaacattattgcttcaaagacaccatcattaacaattccaagtttattaatcaaataaggcataccaaaagtatcaggattcgataatttcatttcccaatttcccaatgctgctctcatatgatttaaatgtggtaatgcatcattatttgattgtattgctatattcaaagagatcgaatcattcaccaatttacaagcttctgctcgagatttgtaatcaaattgtgaaagtggaattgaagtaggataaagaactaaacaacgctgcattgctaatcttgattttgtatgtcctgatgcagtacctgatattgaatcaaaatagtataattcccaaaatgtttttctcatagtatcgagtagtatttcacgtggaattgaacttactctctcagaatcaaataattgatctataaaatttttagaatctgtatcagatggggtattcaatgagaaatcttttgccgatgatgatccatttctctctgttaagaatccattaacatctaaaaagctagaagaaacattgttttgatcaataaagttcaatttcatttctaatgcaagtgagattgttgcatctctaattttatttgataaatcatgtaatgatgaaatatgcgttatcatagctaagagtaataatgattgtagagagagaaaatctttacctatctgccgtatataatctaataatgaacttacaaggaaatttatagtttccacatctcttgcatatttacttgaattttgaccttcacctattattttcatagctaatagtaaatcatatttataaggaatcgaatctaagtataaatgtatgttttcctttgatggtaaaaatggatgtgcattataaaatgaattgtaaaataaggaaacaattgaatcaacattaatatctttaattaaacttggtgagatgtaacatttatcaagtgaggtcattaatttagaatcatcaaatatcttattgattgaatcggtttcttttgaatcattaaaaactggataataatcaacttttttattgccattttgagatgttgatgcatgtgatgatttcatacatggtggtattttattaaaattttcagagtttagacatgattcagtacaatttggatcatcagctaaatgatgcataccatttttaacacaaggtaacatatcagatttatgatttttcctatcaaaagattccggactaaaattgcttgttgatgaactggtaaggttcgatttattggagctattatgactaatacttttagaatcattgaatattgaatctggatatcgatttatactattgaagtctgtttcgagacttacacttcttttctgatcattcatttgattgtaaaaagatttatcattattattttcaacatactcatcattttcattgatattatcaatatcattattaacattttttactttatctttagtagagacacctttctttcttgaaccccctctatgacttttaacatacaagcaaactttatttcgtttttcacatctttcacaaattggttgttgacctccacatttaacatgtcttgatctacattctaaacatgctctagatacatgttttgcctgacttgtagtgcctttgttttaacgtagacattttaaatctgtattattaaaaatattaaaatactaaaatattaaaatacaatgtatttgaacaatttattgtgttcaactagatacctttttcttggagagattgtctactccgaattaaatgtatgttacttacaaaacaaaacgatgaaaaaaataccaaagataaaataataaaagttacacaataaaaaaatgtacaatctataatgttaaacttgaaaaaacattaaagatgcattttaataaaatcgataatgatttatctctatttatccaattgtgtactaactaattccaattggtgacattataagtagtttatatctacactgccattactaccaaattacactcaatgcagtactttcaattcatttaatatatcatcaacaacaaaccccccatatataatattacactataatggatctttatctgtgttacaactaaaatgaaaatccaaaccccgaaatttaaatgcgacgcgcctacatttattatttgattacgtaatgcttgatatttaatttgcatgtttgaaacagagtgaatacatgatttattgttaattagaagtgttgaaaagaagaaatacaggtgttaatacacagcgaatagtacataaaactatggaaaagaatgttgtgatagataatggacaatatcaagttcgttttggtacaatagaacaagaaaatccatttattgtacccaattgtataattagaacacaagataaaagaattcatttaggttcaaaattaaataatgaaaagtcaatgaaagatttagcaattttatcaggtggattatcaaatatttcatttcagcgacctattaaaaatggccaatgttaccaatggaatttagaacatcaaatttgggataatgcatttgttgattcaaaaattgattcaggtaatggagattttttaattgattcaaatttactttacattgaatcacctataatattaccaaaatttcaaaatatggccgatcaaatactttttgaggaactttggtattggaagtttagttagaacttcgggtccagctttagctccttggttaaattgtaatgataatacggataataataatattgaaaaaacaaattataaaaatttccaattggttatagattcaggatttgatgcaacttggataatacctatggttaatggattaccattttataaagcaatacgaaaattaccaattggtggtaaatttttaaatggttatttacgtgaaattgtttcatttagacattataatataacagaggaaccgattttagtcaattcaattaaacataaagcatgttatattgcaacagatttcaatgaagcattaaataatctaacaattttaaagaaaacttcaaataaattaatgaaatcaaaatatgcattaacttatgtattaccaaataataaaaatgattttgaaggtcatgtaatcaatgatatttctaaactttctaaggcagaatatattaaattacaaaattcattaacaaagaaaactcatgatgatgaaataaatgatgacaatttggatgattcaaatatgatgcaatcattattattaactgatgaaagatttatgatacctgaagttattgtttcatcctcaattagcaggtgtttataaatcaggtttaatacaaactattaaagcatcacttgatgcagtacctgaattgttggttcccttattagttaataatattgtttgtattggtggtacttctaatattaaaggttttgaagatagaattgttaaagatttagattcagaggtaccaattgaagctcgttgtaatataattgattattcaaatataactaatgataaaagtctacttgcttggcatgcaggtaaaaagtttttccaacataatggatttgataaagtaaaattgactagggatgaatataatgaatttggtgcagaatatgctcaagagaaattcgggtttaagttagtataaattgtgaaaatgtcatgttgatgtttatgtattatatatatatattgttctataaaaatattaaaaatggaagcaaaaataaaaagaatgtaaattaagtaaaacattgaactgaaagagagcgatttgaatataaaatgcagataatttttgaatgtaaattgtaattgtaattgtaactgtgaaaatgataattaaatgctgtaactaagtaatatttattcactactcctttgtaaagaataataataataaaatgatgtttttcattgttttttttttaatgaaaaatttcaatcaaaagcaaataatgattccataaagtaaaagaattgttgatattaatgaaccagtccaaacaaaacttgaatgaaaaatcgatggagtggaatatctgaataataaaaagcatatactgaaacctgttaatataacactcaatactaaacctatcagtgcaaatgttattaataagaatccacctttaacatttggaacacctccactattctgggaattattaaaaattgatgaaagaataatcgtactgaaaattgaaataaatattgcaaatattgtcaatgtagaatataaaaatgataaaacattatcatgtttagcacgtaaatcaatttgtaaattattaatataatttgatttttttagtgaaacattttgattattcgatggaatttgtgccattaatctctcagtttcactatctgaatcatcttcttcatcagcattataatcttgactattagcaccaaatgaataacttctagtataatgaggttgatgatgatttgaatcatttgacaataatggagtattttcactaaattgtgaatgttgtgaatccttcaatacttaaacctgtaatatctaaaattgattttttaattttattacccaactttttagtattatctgcaagttctgaaattttttcaatcttttcaggtgataaccattccagaccttggcctgattttgaataaatatttggattgatttctaaatcatcatttaatgtatcggaattactatcatcatcataaacatttgcataaaataatcttgaaaaccaactaattaaactatttgaattatggtcattattaacatcatctgcataaacataaaatgtatcattattataatctgatccattatcaaattcattccaatagccaggcttacgtggtgcaatatcatgtttatttaatagaatacctgaattttgattcattatattattactatcagattcttccccatcgccagcgccatcatattcattatttgaataactttcatcatgatatttatgattgacactcgagcttctaatatcaattggtttttgagatttcatttcaggtaaaattctaatatctttttctaataaaatatcatgccaatgtgcaataaagaggagcatttcagcatctgatatattcaattgattggataaaccttcttcttcttcattaccatctgcatcatcgttattatctccggaatttttttgatgaaattcattaatgtataaatatatcagataattatttaatgagaaatttaaattatcaactctgtaaactaaataactgttgattagattttgaatatttggaggaaattctgattctgagttaacatcaaaatttaattccaataaagcatgaggaaaagtttgaacatttggatcttcaataccattttgagttgatttatgaatttgaatattccattctaatgaaatatagaaatcaagtttattatttttatttgaattaacataacgtaatttttttgatgaaacacttgctaaaggtttaacattattatctaaaacccaatcaattgataattgagtcatttgtttattaccctttaaaccactattttcccattcattaaacaatttttgtttcttttcatcaattgatatagaattatcattattatcattattaaatatggaatcaactaattctttatttaaagttgcaattgagaattgtcttaaaccaccaactggagttattaaaattggattattgattgaagatgatttatagttggagactaaaatttgtgaataaggtgaagcactaaaaattctcaaattatcattttctttaacatcataatttaaagattcaggtgaaacattttgaacaaatttaaaactcgagggatcattaagccaaactgagacagtatcagtttcagggcaaaattcctctgatttattattatttgttttacaatttattttattcatggtatcatttggagttgaagattgactattttgtaagtccatcattgattttgtactctttaatttatttttagtaaataatgaatcatcagtaattaatttgaattcagaagataacaagaatttaacttcatcaagattatcataatgaacccaaaataaaagtgaacgaggtccttttcttttagagacaatatcaaaagttgttgattttgaaaaaattggagttttagaattaggtgaatcagatgatgaaggtttagtatttgttgttaattgtaatgaatcaattgtatgaattgaagattcacgttgtctttgtttctttaaacttgaagaagctattaattttttacttggactattgttgttgttggtgttattattattattattattattattattattattatttaggaaagtatctaagaaatcatacaatagagttgtttctaaagctaaatcatttaaattcaaatgaacaaaagatttttcattgtcaatcaagaaattttgagtgattttatttaaaaataattgtttctttggatatgatgaatatttattaaattttttgaatgatttttttaatgcaaatttttgaagtaatatgaatctggataaatcttgtaattctttagttattgaatttaattcattgtgaaatagaagtagttttctattacgtaaacgaattgaaatatctgaattattattattattatcattatcattatcattattaaattctgattctgattcgataaataaatcacattgtcttttgagtaaagctaaacgtctagaaatctcaccaactttagagaaagcaaataaggaaacaaaatcaatttgttctttaaaagctttatataattttttaaaagattttttttgcctttcagataaatgaatttcattactattatttgaggaagatggtgaagttgaagccaaagttgaaacagatgaatcattcttattagtttttgaattggaattagtaataatgttattattattattagtattatcactacttgatgcagcatcatcaaaatctgaagttgcatcctttatcagtgatttgataagattgtaatcaatattgtaagttttccaacgcggtatagaacgttgagcaaattctacaccgaacttcattagaggggatattgagagtggttaatatgcaaagaggattactttgataagagatagtttgttaaataaattaaataatcctaaacgaacaaaagaataatgtataacagcagacttgcacccttcttaaatattaatataagacagacagaaaagaaaaatacccttaaataatagaaaacgaggcaaagcgtctattataaaataattttatcgtgtgagagataacttaaaagggaatggtaaagagcgaagtaatatatataatagacttgatggggactaactctgtaaatgtatcttcttttattttattttattttatgaactattgcggttttaatacacccgtcaatactatacacttctcatctctcataatctcttcctattaatatactattaatattgtatttaatacaacattcccacgtgctcttcgtgcctttaaaaaatattactatataccactatacaatacaaaccttaaatccaatcttatctaattcgctaactaaaaaattgaaaacaatagaaatcaattaatcagtaaaatgatttaacaattaaaaacattgatgaatattatatatcaaattagtctaaatctagtcgtattatcttatattttactcttacttacattgtagtattccatattccggtggcattaacaatatatactctttgaattgtcaattctttcattccttcacgatatgtctagttactcataaattacgttaagttaataactttacatgtcaagaagtcaaagagtcaataattttaataaccaactgtcagttttctagtatatccaaaatatcttccattgtttgacatattttaaaatttaagtttgaacacccgcaaagcacgttttgactgttcaggaaattgatttttttttcaaattctcaagcttttttttgctaccacttttttggtctcatgttttcttacaaaatttattataaggaaaatactttaagctttatttagttaatttaaatacatattcaaattcacatttgagcttatttctttgatattattattgttattaatacttttttttatttttttaaattatacagtttgcaaaaactcaaatataaaaacttaaatacaaaaactcaatacaaaactcaaatacaaaccaattacacctctatctcaatctaagcatctaagtatatcatctcctaacaccataaatgatatactctataaatccacatctttgctgcaagttcttctctctcttgtttaattatttcttgtaattcttccatattctcttcacgacgtccactatcaatatcaatatcttcaagtttaatataatatccaccttttctacctttccataaaacataaataaatatcatacctaataaacaaaataaatttaaattaatcttgaaaaaatttattatttcaatatgttttaaattattaaaatctgggaacattgctgtaaacatttcaaatattaaaattattatatttaagaaaacaccccaccatgatccaataactccactcattgatttgaaaactaattcattaacacttctaccttgaaattttaatgcttgtctaaatctaatgtgaactaaacaaattgataaccaagtgaaaattgatgataatccagataatgccattaaccatgaaaatatttcaccttgttctttacaaactgataaatatcctaaaccaccaaatgctaatgctgttaaaattgcaattaatggtctacctttattatcaatatatccaaaaattgatggtataaaattttgctttgctaaggtagttaatgttcttgaagtggcaaagacagatgaattggcaactgataaaactgcaattaaaataactgcattcataattgatgggaaaactccaatacctgcatttctaactgcaataacaaatggtgaagcttcagcacctgatccttcagaattaccaattaatcttggatcgttaaatggaactaataatccaataattgttaatgaaaccatataaaaaattgtaattctccaaaaaacttgctttgtggcctttggtaatgtctttcttggattttcagtctctgcacttgtcataccaattaattcagtacctgaaaatgaaaatgctgctgtaacaaaaactgaacaaaaaccattaaatccattattaaatgcaccaggttcatgccaaaatttaccaccaatatgaccagttttcagaaccaccaccaccaagattaatgacaacacctaaaacacagaatccaataactgcaataattttaataactgaaaatgaaaattcaacttctgcaaagcctttgacaccaaataaattaatcaatgcaatcattaaaaggaaaattgtgacccaaattgcaggatttacttcatcattccaatatttcattgtcattgcacatgcaactaattccaatggtaatgcaatcaaccattgtaaaagataattccatgacatacaaaatccccatgctggtgataaaaatctggtgtttaatgctaaaaatgaaccactgattggaaaagtaacacttaattcacccaaagcttgaactgttgtaaaaatcattgtactgactaaaaagtaacaaataattaatgatgctggtccaccactacttaatgcagcacctgatccaacaaataaacctgtaccaattgagccaccaattgcaatcatttgaatatgtctattttttaatgttttctttaaactaccatcaccaccagcttgtttttcaatatctggattatcaccatcttcagaattattttcaccatttgtatttcttttaaatccatcaataaaattattccatgcttggaatttaacagtttgtttattagttgttgtggttgttgttgcatttgaaagctcagaagtggtttcattggtgctttcttttgcaattgttgcaaagctatcagttgaataattgtctgacatgttgaaataaaaaatgtgctttaatgaaattttctcgagtttgacttcaataaaaaaaattaattgctggtgaatagcttgttgttgtctttattaatacagattgtatttataatgagtttataatataagaatactatactaaaggaaaaaagagaaaaaggaagaagaagaaaacagagaggaaagtggaaagaccaaatcgaaaagaaactggaatgggtgctctcttttatagtcttttcaaatcacagaataggtaaaactaattacacgctgattcacataaaactacagaattagcataataaaaagttgcaggatacattttactgtgtaaggtagagcagaatatgatttgatctgtaagtgtagtcatcacagaatatacgatccaacagtcatcgatttcgctcaaactgaataaaaaaaattaatttactcaaaatggataatctattactcttttaggaagttacataatattttttgtattagtattaacaaaattcctaagaaacatgatttacataaaacaaataagtttttatgtcaatagaactaataacttaacaaaaaaaaagttaaacatgatgaatcataattttctagcaaatttcaagtataaacagtattatctacatagtgatttaattacatcaaaaagtgattcatcacatagtatagtcataattttaaatagaattttaaaaggtttattttcttaaattatctattaatttattctcatcatatatagttttctatgcaaagtaataaagcccaatgtcaaatcttacagcaacaagagaagaattagaagagcttaaaacgattctatcacaattaaaaaccagtgatcaaaatgattctgatatgaatgagtttcagacagagttaaacaaagattgtaaaagaaaaaggcaaaaaaacgaacaagaacaagcaagtgaaactggaaaagggtttttaagctacttatataatctttcaacaggctcaagtaattatgaagaccctgtcattgatggtgatttagacgaatatgatgataatttaagtatttatgaagatataggatctgaaacaaaaacaatatttcgttccaaatcttacgatatgattacgcaaactcctgatacagaagacgagagggacaaaattttcagtgatgatgaaaatgaccaaaaatccgatgaaagttcacaatcaacacatggatttgagttatatgattttacagatacttttaacttagataacgatgtggaggataaggaagaattaaaaaaggaagactctgaagttaaagcaacatcaactgtatcctcagatagcacaaatctgtctggaagtcttaaaagaacaaaagctgaaattgaaaacttaactgcaaattctttttatccttcagtaagcagtggaggaagtttgcaatttagtgatgtcaaaatgggagatatacttggcgatttagaaggaccttctggtatagataaaagtgagacatcagaggatatacttgactcaatttccaataaaaaagatcaattaacgtttgatgaaaacaaattagttgatgcaattgttaataaattgaaaaagcaattggatccaactctaaaatccttatctgaaatcgctggcaaatacgaaatgatgaaaacattatataaactacccagtatatctgatttgaatgaggaagttaaaataaaatactcatctaagaaaaagaatttcaatttagagtttcatgaagatgttattaaaacactaataaatgaagagactgcaaaaaatcaaaaaagaaattatcaaattaatcagtcttacatcataagtgcaaatgatcaagttcgattaaacttcaataaatttagacaattaaatactataattgaggaaaaaagtttcaatgatagttacgaagaaaatgtacctgatagaggaagaaaagctgaaattgcatgtaaagataaaaattatcaaaaaaataaagacaacagaaaaattgaaagtttaagtacagatgagttagttgaatatctaaatttactgaaaaataaaaagatccaagaattgaataaagttgaacatttagtttcactatttgaagtgacaaatgagaatgttataaataaaatggataatcaacaattaaaacaagcaatattatctgaacttaaaaagcgtcaaattatttaatttcctatagttttttatatttcttttaaatattaactgtaactattttttacataataaactctacaatatatatcattagtgaacacattaatctagtaaatatattagcatacttagttcttttgcttcttcttttcaggttgtttaccaccttcatcatcacttccaccactattagcatcagaatcatattcttcatcaacttcagaatcttcagaatctgagcccccactattgaaatcttcatcaggggattcatcatcagcagatcctaaatcagcttcaccatcagaatcaatcattgcgtttgcaagcatttgttgagcaatcttttcatcatttctaaccttcaaattctttgatctaaaaaatgattcaagtaatggttgttctgctctgtctatattaccaaaactatgagttggaccacctttagatgtaacaatttccatatcaaaagttttttgagctgaaccttgaccaactcttgaaaattcaattaatgagatttcagaatatggaattaaaactgttggtttcgttaaaaataatgcacatttttctaatgcatataaatgaccttcattagcctttaaagaacatgcaatacctggtaatccatccttagattgataagtacctggcataacaactctacgttcagtgaaacctttgatcaaattagaaacaacaagatgtgaacttgaactataaactttattgaccttgtccttatatttttcttcatattcttcatcatcaacattaagttcaacttctaattcttcttgttcgtcgaattgtaatgttaaaaatgaatattgtgtttgaccttgtctcaaaggtggattaacttgcaaaattaataagtgatgcattccatctaattttggtaatgaaaaaattcttaatatttgtgtatattgtaatttataatcataagttttacctctcaaacgtaagaaattttcatacatatcaatatcataacgacctcttggtgtaaggaataatacttcagcaaatgaaacaataacttttccaacaacttgtgtaatatctgcctttgattttaattcttcaacaaacaattcagccctcgttttcgtctttgtttgctttgaatcatctttcttttcactatcttcgttcatttcagaatcgccatctttatcagttttctttgtttcatcattctcatttgcatttacttttttcttttcatcatcttcatcatcatcaatatccatttgttcatccttcatttctacattaccaggtatgaaaaactttatttcaactaattcatcacccgttctttcgacagtatcattttcatgtaataaatccatttcaacagaaacttcattacgaccacttaaattagtatttgaaatttcagtataaggaatttcataagcaggtttatttgcaatattgaaaattaattcatttcttgccatctgtactttaccccaattccaacctcttaaagaatgttccttagtttctaattgaatattgaaatttttagataattcatgttttaaaccaactgaatcacgttcatcaaatccatctaatataacaacacctttattttttgtatcaattcttaattcataaccacgagaacctctagaccagtaacaactagacagttcagtacttggtaaaaggaatggggtggatttggttgttgaaccaggtacggattgagctttccaaccaagaccagaatctgcaattctcattctacctggtaatttagaatgattgagataaattctttcatattcggatgacatatttattcaacagtagtatgcctctatatcttcttgttattgttcaatacagatactctctaataagaaattgctgttactgatttgccattgaattgaaatttatcacttagtgcaaatatcaatgtgttgtgtttaaatgatgtaaaatttcgtgttttttaaacaattacgtaataatattagacgcgtctgtttgaaaaattaataaatctgtacaccacttaaataacttatggaattgggcaggtggcaagtttcttcaatggaaatttacgacgctctccatcaaagtgaacaacttaatgttattgaaatttgtctgcacttagatttaactttacttttactttatcagatccaatcaattaacaatgtctgcagaaggtgaagaagaattacttgactactccgattccgaagaagtcacccaacaacaacaaaccgaaaatgctgatgtcgcagcagttaatggtgatgaagctgacaaaaaaggttcatatgtcagtattcacacttccggtttcagagattttcttttaaaacctgaattaatgagagctattgctgattgtggttttgaacatccttcagaaggttagtatttcatttttcaatgtattattatattaattatttacaatataataataataatcacattatcttcttattttactatctttcatcctcatcagttgatattcacatggtcaaactgatgatataatattaatccgatttggataactctacaatcaatgagtagtatgaaacattaggatggttaatttaccttttttttgccgtgggctcatcttgatggaatattattataattggtattttttcatcgaattataacattatatctagtttttcaattaagtgaggaaaaaagaagatattccttattgaggtaatcaaactttattgatgtgattttaattgttatcattaaaaagtacaatatttttttctcagtcagtattttttcaaaagtactatataagacaatttttgtgggtaatcaattgcatgagtttggaagaagtaaataagatagaaattattatttaagaacacaatttaaactaacatatttatcccccccttttttttacgtttttttacgatagttcaacaatctaccattccacaatctgttttaggtaatgatgttttatgtcaagctaagtcaggtttaggtaaaactgcagtttttgttttatctaccttacaacaattagacccagttccaggtgagatctcaactattgttatttgtcatactagagaattagcttatcaaattaagaatgaatatactagattttccaaatatatgccagatgttaagaccgaagtcttctatggtggtgtttcaattaagaaagatattgaaattttaagtaaaaaggaaacttgtccacatattgttgttggtactccaggtagattaactgctttagttagagataatgcaattaatttaaaacatgtcaaaaattttgttattgatgaatgtgataatgttttagaaaatatcaacatgagaagagatgttcaagaaattttcagagcaactccattccaaaagcaagttatgatgttctctgcaactttagcaaatgaaatgagaccaatttgtaaaaagttcatgaaaaatccattagaaatttatgttgatgatgaaaaaaaattaacattacatggtttacaacaatattacattaaattagcagaagataagaaaaatgctaaattagctgaattattagattcattagaatttaatcaagttattatctttgttaaatcaacaaagagagcaactgcattaaatcaattattagttgattctaatttcccatcaattgttgttcattctggtattccgcaagaagaaagaattcaaagatataaattatttaaagaatataataaacgtatctgtgtttcaactgatgttttcggtagaggtattgatattgaaagaattaatttagcaattaattatgatatgccaagtgaagcagatcaatatttacatagagttggtagagctggtagatttggtactaaaggtttagctgtttcatttatttcaactgaaaaggatcaagaaattttagataatattcaagatagatttgatgttaaaatccaagaattcccagctgaaggtgttgattcatctacttacatgaatacttaagtaaattgaattaagtttgtaaaattctttaaatgtatgcatatattttttaaaaataataaactagttacttgatgtaattaaggaataaaccggagatttcgcatttacaaaagataaacaagggatgatcattccactagaaaatagaagatatcggagaataacttaaaacaagtaaatgtaaacaacacaacaaggagagtgaaaagagggacagcaaaactccatagatcacaaaaggtaaatggaatgatttcaacttcatactaagaaaatggatacacgacgcgtaaaaagaagcgtgtcaaagaagaaagaggtcttttgagggcaaatggacgcgtactttttctaagttaaaaagacaccattttcctgaattttttttcatacttgatttacgtttcttctttccttttcaaatctatttgtctatattctttataattacttcctttcagtaaaacgaaccttttaattaatagaatcaaatgtctgtccaagaaacaccatctaaagttaccgctaatgcactttcatctcttgatatcagcaaagctgataagaaagatcttactgcaactttaactgctgcagcctaatgcaaaggcagttgcagctggtttaaaaccagttgttgttgaagaagaattatctgaacatcaaaaatttctaaatttacataaagttcatagacataaaattaaggaacttgaaaagggtgaaccattattaactgaaaataagagaagatttgttttattcccaattaaatatcatgaaatatggcaaatgtataaaaaggcagaagcatcattttggactgctgaagaaattgatttatcaaaagatttacatgattggaataatagattaaatgaaaatgaaagatattttatttcaagagttttagctttctttgcagcatctgatggtatcgttaatgaaaatttagttgaaaattttagtgcagaagttcaaattcctgaagctaaatgtttctatggtttccaaatcatgatggaaaatattcattctgaaacttattcacttttaattgatacttatgttaaagatccaaaggaaagtgaatttttattcaatgcaattgaaaacattccatgtattaaggagaaggctgaatgggcaatgagatggatgagtgataaagatgcattatttggtgaaagattagttgcattcgcagctgttgaaggtattttcttttcaggttcatttgcttctatcttctggttaaagaaaagaggtttaatgccaggtttaacattctctaatgaattaatttgtagagatgaaggtttacatactgattttgcatgtttattattttctcatttaaataataccccagatgaaaaaattgttgttaaaattattactgaagctgttgatattgaaaagagatattttacagatgctttacctgttaatttattaggtatgaataaagatttaatgtgtcaatatgttgaattctgtgctgatagattacttctttcattaggttgttcaaaatattataatgttacaaatccatttgatttcatggaaaatatttctcttgctggtaagactaatttctttgaaaagagagtttctgattatcaaaaagctggtgttatggctaagagtaataaggaagaaactagtcaagatggtggtttcacctttgatgatgatttctaatggttatactaatctttctagttttccattttccttttacttctactctttaaactaactttaactttacttttactaacgagtttatgttcttttcttttttactcacagccctcttttatataaagtgctaagcactttgtctctctcttttctgttgtattatgtatattattgactactattattaaattaaatattaaattaaataaatgtcgaatcatctcacagtctggaagaagacgcgtcgtgcaaaaaatatgactaagaccctgtcatttgacggagagaaaattagtaatttctttcccgcccttttactataattaattaattgaggcgccttttacttggttatttccaatatatagacaactttggagtctgtttaatcattaactgatatttgctgtttgagttgcacttattaaaactattaaaagtgtccgctctaaggtgcacatacaagcagtgacagaccaattacctccaaatttaagcggttttttcacacacacagagaacattgacttgatctggtaattttaaaaaaaaaattcaatttttgaaaatctcactttttttgagcaacaaattaactaaggtgaaatttagaaggtaatataattaatttctacgttgatcctttacttattaaatataagcttttactctttacagtagattaaatcttttgttcatttaattgagtttacacatctacgtttgtttgatcaaaattacggtaataatcaataatttaaagtagattcattcaagtgcttcaatttttggaaatttttggaaatttttcaaattaagatctcagttttcattttattcatcattcttctatattctatttcagcaaaaaaatcatcaactattttttgatttattgatttcagttagccaaaataaaatacattttctgactaattatattttttccttattattctcattattaaatggattcatcatcagtaaacaataatccaactttaagttcaacttcagcttctacaaatttaccagcttcatcatcagatcattctaatcccgcttcctatacttcaaataatatgaatcgtcaacgtacctataaagaagcaattaatgctttaaactctttgcaatcaaattttgcaactattgatgcagttagaaaatcgggaataaatagaaattcaatgttaatgcctgaaatgattgaatgggttagaagaattggttataaaccaagtgattttaataagttaaatgttattcatataactggtactaagggtaaaggttcaaccgtgcgcttttgttcaaagtatcttgaatcaatatagattaccagtgattcttaataatgctaacaatattgataattcaattttaagtgatgttaatagtatcaaggataataacaatttatcaaacaatactcgatcgcactcaacttcatcaaatgcatcaagtgatatttcaaaaattacaaaaatcggtttatatacttcaccacatttaaaaactgttcgtgaaagaattatcattaatggtaaaccaattagtgaagaactatttactaaatatttttttgaaatttggaaccgtttagataactccaaatcagatgccaatattttccctcatatgggtgatggtattaaacctgcttatttccgttaccttactttattatcatttcatgcatttgtaagtgaacatgttgatactgctatttatgaagtcggtgttggtggtgaatatgattcaactaatgtttttgaaactccaactgcgtgtggtattagtgctttaggtattgatcatacagttatgttgggtaatacaattgaagaaattgcttggaataaagctggtatctttaaaaaaaacgcacattgtttcactgttaatcaaccagaatcagctatgaaagttattgaaaatcgtgcaaatgaaaaaaatgttgcttcctttaacatagtgcctgaaagatcagatctactagatataaaattaggtcttaatggtaattttcaaagacaaaatgcatccttggctatttctttatgccatgctcatttaaatagattgggatataaggttgatattgatactttatctgatgagtttgttactggtttagaaactgcaaaatggccaggtagatgtcaaatcattgaagatccaaaaagaaaaaatgaattgacttggtttattgatggtgcccacactgaggatagtgttaagaatggttctcattggtttactcaagttgcagatagacaaaagaaaagagttcttttattcaatcaacaaacaagagatccaagtatactacttacaacattattcaatgaaatggaagcatcaaatttgaaatttgaccatgttatttttacaacaaatattacttggtcttctggtgattattcagatgatttggtttctatgaatacagataataatgctgtaaattctttggatgttcaaactcaaatggcggagatttacaataagttagacaaaaaggctagaaagcatctattccatgatattgaaacaagtgttaactttatcagaactctggaaggtcctctggatgtttttgtttgtggttctttacatttggttggtggtttccttgttgttttagatggtaaaccggtaaactaaaaatgatttcctttaaatttcatttcaattatatttcttggtttaatctaattcaatcggtccttttataatttttgtctctcactttactgcatttattttaatatcttttatattgtatattgtcgtaatactagtctgcatttttgtaaagtagatccaatttattctatcaaatttatacaaattacgtatacctcatcgaccaagattcagcgaagataatacaaattttttaaatcgttgcatgtcaattttcagttccgttttcagccttcctcaatgtcatccataattgattctgttgcaaattttggttgcttgtgggtaagaaacaatgagtagtcgattgaaaatagaagaacgagaagcttttacaaaggtatgtagagtttaatttaatttttttcaaaacaatttcaattttaaagaaatcagtatactaacagcataattattgaaatcaattagaaagcacaagattacacaaacttaataactaaattctcacaatcagaacttatacatgttggtaactacaaaataatgtctgaaattggttctggtgcatttgggaagatttatttgggatatcatagcttactcagatgtaaaatatgtttgaaaaaaggtggaaggaatctaatcaatcatccagacgttgaaacttcaaacctatcaataagtactacaaattcaaaagtaaatttcaaaactgcttcttatgttaataatgacaacttaatgagagaattttattatttacgagaatttagacaccatccatgcatcaccaaactgtatgaaatcatttttacggagaattatgcatatatggtgcttgaatattatccatccggtgatttatttgaatatgttactaaaaaaggacatttatcagttgacgaatctttaagaatattttctcaagtactgggggctgtctattatttacacaaaaatgggtgttgtcatcgtgatttgaaattagaaaatgtcttactcgacaaacaaatgaacgtgaaactatcggattttggatttactagagaacttcctttctctatgcatggaaagaatggattattaactgaatactgtggtacaggagcatatatggcacctgaaatagttaaaagaactccatacaatggaattaaaatagatatttgggcactgggtgtgatgttatacactatgttaacaggggaaatgccatttgatgattcattggatgtaaaagagttggaatatgcaataatacataatagaccccgattcctagaaaacatagaagatattgactctgattctgttgttcaattacaaaacataaagagcttgttaaatatgatgttatgtaaagatccctgaagatagaatttcatcattagaggatatattgaaattgccagtatttgaagcgtatgatggtcaacagcaaattgacactgtgaataatttatactataatgtttccaatacaaaacatagctggtctgatcttacatctagtgagaaagctatttttaaaagtttagttaaagcaggtgttgataaagagatattaaaaagggcgattcaggaggagacattggattcggcctatggaatatgggcattactcaatgatctaaatgaaaggaaagaaaagaaagtgagcaagaagagaagaagtgttttaacactatctagatcaagatcgataattggcaatgcaagacaagtgttcgcatcttccccaatacaatctgaaaaggaaaattctttaaacatgggaggtggctttggcgccaatttatccacaaacaaaagtaacgataacagtataaatacttcattacaaagaagtggttctttgaaagttgtaagaaatttactgaagaatgatcacgaaaaatcaattaaagatgcaggtggtgataaagaaatgaatgaggatgatagatattcaaaattaaatgctgatcaacatagtattttgagtaggagtacaaagattacaaataattcctcggtaagtaaatcgcagtcaaacgttaatttgggaagtaaaaaacatcacttttctttgagaagtttattcaaatccaagaataaactaaaaaatgataataatataccaactgagcaaaattgttcaacaaaaaataatactatttatggaactgaaaataaaacgttgaaccgttccaaaaaggacttcaaaattgttccaaaatcacagactaccccagttaacaaggccccaattttgaaagaggaaatgtttcctgctacacctgaagcatcaatactaaaaagatcaaatccaacaagacctctttctgtaatttcaaatttttctactcatacatcaggtctctgagacatccaatggctctggatatatgaccggatactcaactgacgttaatatgattaatgggaatcacaatggagatggtattaattattccaacagtaagtttgagaataggaatgatgaaacatctgaaaaagtgaaaagacacaacaatgtcgacctaacactgtcattaaatcctgaaatcaattataacactactggaaattctcagctactatcatcaccacaaaattctaacagacccaaattttcaagaggaataagtgactggtccacaaatatgtcttcacaagcagagtctcctaattcttcatttgttgcattgtcaagatcaaattctatggactccttgtctagatcagcttcggggcgaaagaaaaatttgaatgtttcaacacctagaaataggggaagatcgcctctaaatggaagaatgaatacaaagtgggcattcaatactgtaaatacgttaaaggcgaaacatgaaattccaaaagccaataggcaaaatcaaataattgaagaagaatccagtgctcttgacgatattgatgacgaggatattgatgatgatgatgatgatgtagatgaagttacagattttttaaaggatggtacagaaaagtttaacaagcttagattatatcaggggaatgaagatggaactaaacgactaaaaaagcagcatgatgacaatagattatcaaatccagttagaaagagtagactttatatgagaaagaaatcaatgaagttcccaacattaccaattgcagaagaaagtgatcgtgatctagaatctgaattggatgaagaagcggatattgaagaagatgatcatgattatgatgatgatgtacatactgaattttccgtaccagagaatgtctcagcaatagttcgtgctgaaagaccagcgagttatgagagtggaaacaacggttatatttttcgtacagtacattctccagtaccacaatattcatctaacatttctaaaaacattttagaaaaatgattttacatagtaacaatgtgtatctacagtttgtaaagtagtgttaatacataaatttaaatagagactgattgtgatccggaaaaaaattctcggttcggagttcggtaataaaaggatatgttcggttcggtaagtggcggttatttgtggcagatggcggatgttgtctcggttagaggcgcattgtggcatatactccaacatctgttacaaaaattttatcttaagatgtctttgatgacccagaccacttgtagtatataaaggagtagcatttccaacaaatgattaatgcttttatttctctctttcaatttcatatattatatatttaattactttgaaattttgtaagacgagctaattgatcaaacagataatcatgttacaatccacaaccaatgttttaaaaaatgatataatgctttcttctgaaaacagcaataagattgcagaaatgaaagatttagatcaaattaaacaaaaagaaatcactatttccgaatatattttccatcgtattttacaattaggtatcaaatccatctttggtgttccaggtgacttcaatttaaaatttttagaacacatttatgatgttaagggactaaactggattggttgttgtaatgaactaaatgcttcatactgcagcagatgcttatgcgaaggcttgtcaaaagatgggtgttgtattcactacttatggtgttggtgagttaagtgctcttaatggtattgctggtgcatatactgagtttgctcctttattacatattgttggtactagtgctttgaagttaaaaagaaatcactaatcctattaatctacaccatcttgcaggtaacagaaaaacatacctcaaaagtgaccattataaatatgaaagaattgcaggtgaatttagtgttgactctgcatctttagaagataatgctgaagaagcttgtgaaatggtggatagggttatcttaaatgtttggagaaacagtagacctggttacatttttttaccatgtgatttaccagatatgaaagttgattcagcaagacttcaaagaccaattgaacttgagtatgaagtcaaatcatcattaagtaaaattgattgtactgttgataagattcttaaaaaactttatgacgccaagaatgtttcaattatttttgatgaatttattagaaagttcagaatggaaaaagaatttaaaacattagttgaaaaactagacaacaaagttaacttatattccactacatattcaaaaggtttagttagtgaattacatcctagatatgttggtaactattttggtaaatatgaaaagccggttgctgatcttgttgaatcctctgatttagtcttacatattggtaagtttgctcatgaaattaatgatggtatgttcacatttaatattgaacaaaagaagcaaatcaatttatctgctcaatatattgaaattggtgaggaatttgatgagaatactaatatgatggaaattcttccagcattagcaagtaaaattgatgcctccaaaatttcagaatctgctaaacatgtcaaaccaaaaacaagctatgatttaaaggaagaatccggcgaaccacaagaattcccattaatggaacaaaatattattaaagcacttaatgaaaatattagagatgatgatatattgattgttgaaacatgttcattcttatttgctgttccggaaatcaaaattaaaaatgcaagattaattttacaagcatattgggcttcaattggttatgcattaccggcaacattgggtgcttcattagctttaagagatttcaatcttccaggtaaagttattactgttgaaggatgatggttctgcacaaatgagtttacaagaactctcatcaatgataagatacaatatcgatgcaaccatgcttatattgaacaattcgggttacactattgaaagagttattatcggtcctacaagttcatataatgatattaactcaaattggcaatggtgtgatatgttaaaatgttttggtgatgtaaagagtggaaaatctgaaagttacaaaataacaaaagctgaagagctctacagcactctttcagataacacaatctacaataacggtaaattcaaacttttagagttaatgttaccaatgtatgatgttccacacaaactttctgctttcacttctaaataaatgtttgctatccatgcaacttctgtatattattaatattattaaatttatatcttatatgtttataaaattctcaactctatattgtttcttcaataattttttccgaatgcttttgtacaataataacaaattaatccgaaattttttatcggcactcgcagatccccaatttcatgattactaacttgtatactgtaagatatatgaaccatcgatagataaatgaataaaaggaaaaccaacggatatatatactagttagtgttttgttttttatggatcttacattcagcaatattgccggctgaacaacaatgacaggtactaaagacagtacatatccattaaacaagggaaaagttcagcagaacgacgaagagttccctgatggtggctttacagcatggatggttgttgcagccgctgctacaatcatggcaatgtcatttggaatgtgtaactcatatggtatttatcaatcatattatgaacatacatatccaaatatcccatctaatgttttaacaatcattggagcattacaggctgcattcacttacttttttgctgtgccttcaacaataataatgagttatattggaccacaatgggtggtgctaattggtggtcttatatcatcattagcatttatgtttttatcaatttcaaactctccatggcaattagtttattattcaaggagtaatgtttggacttggttccgggttgatgtatattcaagcaactggtgtcacaatacaatatttcaacaaaaataaggccttggcattaggagttattacagccggtgctagtctagctggtgtttactggccaattggtattagaagtatgattacaaaaattggatttccatgggctaatcgtgttattggatttatttatattccaatgacactcttttcatcattttatcttgttccgaggtttaaaccacaacctagaaaaccagatgaaaactttctaaggattaattttaatgttttaaaagatttgaagtttcaatgcttgaatgttgcttggtttgcttttatgctttcactattcccaggattgttttttattgatttattttgcatcagagcaaatgtttcagaagtcttcaactttatagtgttgcaatagtgaatgcatgtgcaattgtatttagaatcttgcctggattcctggctgacaaatttgggagaatcaatatagtgattccctctttgatcttagcgggtatatttccattagctctttggataccagctcacaatactgctttaacagctacattcattgtgttatgggcatcagcaactggtgttccagtggccgtatatcctgcaataacaggacagcttttccaaagtacaggacatatttattcatatttaaccgtgttttatttgtatggtggagttagttctttaataggcccaattattggtggatcatttattccacctggtaatgccactacaacaaaaggattcgaaaaacttgcgattttttgtggagtcttatgtcttgcgtctgctgctgttgcttttcttttgagatgtttctattcgaaaaagttatttgtaatcatataaaattctgtataatctttaagaacctttttttaatcgatcaaatatacacattaaacaacctaaaagggtaagaaaatatttccgaaaaaaaaaataatcctcagaaaatttgttaccaaatctaaacattttatatcgaactgtctttcaaggttttcaccatattctccatcaaaccgatgaaatcacttaaacttgaaaggggtgctattttaaaaggttttataagctctgtgaaaccttttggagcctttatttccattccaggtgaaaataaacaaggattatgtcatatatcggaattcgaatcttcaaaaataacaccaaataaaggagatggaatatttgttaaagttattaaaattacagatgatgggaaattctccttaggattaagaaatatagatcaaaaaacgggtatagaaacaattcctcgaactaatgttagtataaatgaacatataagtaatagtacaaattctggtttcaagcgtcggaatgatatggatgtgtgggaaagaacacagatcaatgcagcctatggtgcaaagaaacaaagattagtacgaggagatgatgatgatccatttgcagaagttgattcaagtgatggtctttcagaaggagaagaagaaattgaagtgcaattaaacaatcaaatacccaaatttttagatccttttaaggataaattattgaaaaatgcattaagaagagttaaagaaggtgaaaaatcaaacacacgtaaaatcaatacaaagacagcttcattggagacaattgctagtacggggagtcaattaatgaaagacgtgaaactcagtaagatagaaaaaatgaagatggctgaacagaaacgtcgagagttacaaaaaagtcagtattttgatgacccagtgatgaaggaaaatcttgaaaagcaacaagaaaatgaagcaattgaagaaaaagcagtcattgaatggaaaaaacaatcaaaatttgaatcatatggtataaaatcaaaattaagtatacaggaacaaagagaatcgttacccgtgtatcaatcaagaggggaacttctaaaagctgttagagaaaatgattttgttgttattgtcggtgagacaggttcgggtaagacaacacaaatcacccaatacttagcagaagatggttttgcaaataggggaattatagcatgtacacaaccgagaagagtcgctgcaatcagtgtggctaaaagagttgctgatgaagttaactgtaaagtaggtgatgaagttggttatactattagatttgaagattgtacaggacctaatacaaaaattaaatatatgactgatggtatgttggaaagagaagcattggtggatccattaatgagtcgatattctgtcataatgttagatgaagctcatgaaagaacaattgctacagatattttgtttgcattattaaaagatgctgttgctaaaagaaaaggaacattaaaagtgatagttacatctgcaacattagattccacaaaattttcacagtatttcaacaattgtcctgttttccatattaaaggtagaacatttcctgtcaaaatctactacacaaagactccagaattagattatatcgaagcaacgatagatactgttattgatgtgcatgtcaataatcctgatggtgatattttagttttccttacaggtagagaagaaattgaaacctgttgtgaaaccattattgaaaaaatgagtatattatacaaatctgatccgaatataaaggaattaatagttttgccaatttattctgcgatgccatcagagatgcaaagtagaatctttgataaggccccaccaggtaaacgtaaagtagttatagccactaatattgctgaaacttctatcacgattgatggtattttctatgttattgaccctggatttgtgaaagttaacgcatatgatccaaaaagaagtatggattcacttattatccaaccaatttctaaggcacaagctgatcaaagatctggtagagctggtagaactggtcctggtgtatgttatcgattatacacaaaaaatgcatacttgaaggaaatgagtttaaataccaaaccggaaattttaagacaaaacttatcacatacgatattaatgttaaaagcaatgggaattaatgacattttaaaatttcaatttatggataaaccaaatgaagattcaattttgaaagctttagaagaattatatattttagaagctttagatgaagatgggttattaactgaagttggaagattaatggcacattttcctatggaaccaaaattatctaaaacattaattaaatcatttgaatttggatgtagttatgaagttattgaaattatttcaatgctaagtgtacctgatgttttctttagaccaagggataaaagagaacttgcagataagatgaaacaaagatttgatgattataatggagatcatttaacattacttaaaatatacagaaaatgggagaataatggattttcaaaagattggtgtactgacaatttcataaatgaaaaatcaatgagaaaggcaaaagatgttaaaaaacaattaattaaattattggatacattaaatgggaaatctaagggtaaaattaatttagttttgagtagttgtgataacaaatttgatcaaattagaaaagcatttgtttcaggattttttgaaaattgtgctaaaaaatccacaaatcatggacgtaatgatgaagatggggttttcaaaacattatcagacaatttatctgtctatattcatccaagttctgcattatttaaaattcctggtgttgagtatgttatttatcatacacttgttttaacaaatagagaatatatgcattatacgactaagattgatccaatttggttaattgaatatgcatcaaaagttttccgtagagcaaatgaaggtgaattgggtattaataaaaaacgagagagaattcaaccactttataataaatttgatactaatgaaagttggagattaagtagaggtagaagataataacttatcaattaattttgattcattttgtgcataggataattttatcttcttatcgaaaaattggaatccatcaaattgatcaatacaagctttagcatcaatatcagatgcaattacagcccaaacttgaccacgatgtttaggtgaatattttatttgtataacatctgcgaatgatgatagtaaaatgtataaattttcaattaatttttttttatttatcttactatttaaattagatatatgaattgtatgagaaggttggatatgttttctcttcgatggttgtgtagaagttgctattcctgtacgtttcttcaaagtagacattgttataaaaggaagaaagaaatgtaaatatagtataaaaatgtataaaaacaaaagaaaacctggaaataatcaagaaaaaaaaattagtatagtaaagctaggcgagtcagaaagagttcttcccacaattactctccaatatcttcattccagatttctggatgtttagcaatgaatttatccattaaatctttacatcttgcatctttaagattaataacttcaacattattctttgctaaccaatcttctgcacccataaaagtttcattttcaccaatgacaactcttggaattttaaataataatgcagaacctgtacacattgaacaaggacttaaagttgaataaagagtacaatttttagtaattgaagctggaactctatttgttgcttcaagacaagaaatttctgcatgtaatgtcattgaatttttttgaactctcatattatgacctctacttataactgtaccatctttatgaattaatacagaaccaatggggacaccaccttcattaaaacctttaagtgcttcctcatatgcgaggtccatacctttaatatcgtcgaaagtcattattattcttggagaaagaagcttaaaattattaataatattattaatagtaatattagtagtataattatttacaaaatgaaaaaaatctaaattttcgtagctaaaaaactatacgtgtatagtataagtaatgaatgtaaaataaatttataaatttataattttttgattgtttttttttaaaggcctgctttaaatacccatatttaaccattcccaattaggatctgcattatttggattggtatttggatttgtatcatgtaaaatcatattattatcgaaagcatcagaaaaatctgtatgatcaatatttggtaactcatgcatattaagatgcatttcaatatctaaattaggagatagtaaattaacaaaatttgaatcatccttattctgctggtgttgttgatgatgttgatcatgtaaattattatttaaattatctatattttcatcattaatattattatctataatattatcattaatattattataattatcatcatcattcatactagtatctatatcatcatttaattggtttttaacaattggagttggattaagatcatcaccatcacctaaataattatcatttgaatcaattttactttttcgtttcccaccacgttgtctctttttaattacatcagttttcaaactcagtggacgaacaacaccatgtaattttaaaaataaaccacaagcattacataaaggttcaccttcagggttacgtcgccataatggagttgttcttgtatgacaatttgtacatgaaatattttcatcatttgttatatcttttttcttttcagattttttcttccttgatgaagatgatggagtatttgaattagaattgatttcattatttatgtcattattgatatcattattaatttcattattgaaatcattgttattaatattattgatgatattattattaatattattattatttatattaccatctatttctgtgtctagattagtatcaaaatttatattatgataaaaattattacttatattattattaataatattcatattattattattattattattattattaagacatttcttcttttcatttctcaaattaataaacatgagtctccaagtaagattttccattcttgagcgatagggtaaaccaccctttgccttagcgtacatacgccatagtgtactggcatcatccattgtctaatcaaagacccaatcacagtgacagtctcaaaacagaaaacagaaatatagaataaaataggatagaaaacccgaagagatagccaacctgtaacagcaaatgaaaacttatcgcgccaattcaatttcagcgataagctataaaaaaaagttccctctccaccatctgcaccagccgcaagatctgacaaatctcttcactcgccatccacaacagggtggcggtgttcatgttcatgttggtattattattattattattatcaataccaagactcattaaaacacagaaaaggaatcttttgacttcacacagtctcatcgtctcttgatccatctcttggtctatctcttgatctatctctttgacatcatatagtgataggtacgtctttaacactgcattattactccatcgtcgtattctcttcactctcatcattatacattcaacaagaaactgttctgatattttaacaatccttttactatctccgtatttctcataaatcccttctaatcgacgtatattcttaaccattaatcttgatctttcaacaaaaatattcatgtaaatctgtaatccaattgatgcattttgaactgcatttaaaattaatatagatattattattaattgtataatctctcttcttattgatccattagataatttattttctattatatgtcctctaatataacttaatatactaaatgcaattattttgggtttaattgaatgtaataataccttatatggtgtctttgaaattgaaatactatattcattaataatttccttaatatcataatttccatctcctcgttttaataattcatcattaatcatatcaaatttaaatgattcattaattcgtcgtatttcttccttatttgctatatcagaataaacatattgtaatgcatatttttcaactccaacataattattcatttcaatatattcaatctctttatcttctttattgtcataatcattataattatcctcatcaccttcctcttcatcccatgttaatacaactcctttaccaatattcaactctttctctaattccatactatctctaaactttcttctacctctactactccttttaccataatatacaacagtatcatcacttccttcctcttcttcttcctcttcctcttcctcaattcgttcatagcgactcatttcccaattatgctctatactatacgataatttaaatataaaaatttatatttgtaaagaaaccacaacctaaaaaagtaataaaaaaatcaaatcggtaaacataatcatgttgctgctacacaaaatttatattttttttttcatctcgccatgtattttggaaattctaatccaccagcttttaactctccaatatacattaatacaggataacattgtacaataatcatccataaaatcgataatggtttgttgttaaattctccaatgaatttttcgattaatccttcaatcaaaacaataattcctgaccaaataaataataacatagaataaaaacatctatttggtgataatttaataatattcaaaatattcaattctaatggtatgaaatttggtacatcatcattatattttttaccaccatcccaatctagatttaatgatccaattgcatgaattataccacaaatgataaatgtacccataattaacatcatccttcttaaatttttattcctaatatttccaaaaattcttttgctcaataaatatgaatcccttgaaagatattgatgccaccatattgaccaaaaaacttgcattgaccatttatctcctttaaacatttgaaacatatcaggccaatctttaacattagaaaatccaaatgatactgaagatacacatgcaatccaatacattaaattaaatccaaaataaatttgcataactacggataacatcattgaaattttacccattcctaatccattatgttcataaatatatcctgctatctcatataagatatatttgaaaccaatttcataaaacataattttcagtataacaaatttaataaatccatcattagttgcttcaggtacattcttcatttgaaaattccatccaattcctcgtaaattaacagaacaacgatcaaatgcccaatataatttaccatcttcaatctttctatcctttttaaaatctgttttctcaatttcttcaaacattaataaattaattgtcatattaaacaattgtgttaaaacaaaattttgcattaaaatacttaattgatcagctctattaactattttatttattggtgaataaattaaatgtaaaattgcaataggtgtataaacatatttacgtggtttacttggtaaataaataataaatgaaactattaaataatgtaaaaagtaatgttctaatggtaacgtgaaaactggtgaatgaataattttttcattaaatataaatttcaaaccattatcatataaataatttgctattaattgtttgttttctattatcttattactcataaaactcatctcaatttccatgaaagaagatcttcaatatatgcttttttgagttaattttaaacatgagcctcaaaaaaaagttttatctaacatttgcatgttttgagatcaataagaaatttaaaaaaagttaatcgaccaacatggttgctatttaattccgataccgggagtcgaacccgggtctgcccggtgaaagcggaccgtgatagccgttacactatatcggatgttatataacttcaaagtagttgggttttgttgtagactatctgtctgattacgtaattgcatatagatgtgaaaagtgttggtttttgtacaataaaataattgatactagtgccataagtatgcatagcttattatgaaaatataaaggtgataggccaaatggttatacaaaaaattttgatttttaatttataccatacaatcatagtttttaccccttcctgttttattttgagattttattggttaagggtctgtttcatttctctgaaagttaaaaattaaaaaaatcacccatagaactgtttaaatagttatatttgaattattcacatccatttcttatatatttgcaaagaattaacaactacacacaataaaatcattagtttataattatttcatcaaggaactgtatgtgtcaagattattgagaggagatgacttaaagttacaagtatagtcacacattaaacatttacaaattttaaagttagatttaaattataatcaaatgcattttacaagacatcgaaagtatgcacatcactgtgattctcaatgtacgaaacgaaataaaaaaaaacattttcaaaaaacctagcttttctcggttataacaataaactattatttgttatagtatcggttatcggatcaatttaataatcttattactgaggaatcaatagtatttgaaatttgtagtcttcatcactgttggcaggactcagtatgtattacttcacgagttgtaaatatatatataatttaaaaaaataagcatcaattaattgaaaaagttgcaaaaaatttaatgtttagcctccacactaggactcgaacctagaatcttctgatccgtagtcagacgcgatcaccattacgctatgtagagaacttacgaccttcaaattgttgtttttctggcgttgggagtttaaaaattacaaatcacgtgacaaatatttcaccggtttaaaaagggtacaaatcatatggttttttaaaaaatgttttgatgtgtggtacctttttgtttttttcaataaatcaattaaaagatcgtttaaaatacattaaaaaaatacattaattatttaagtcagctttaaataaaggtgcgttttacagttaaaaacaaacaatttttctaattttcaagcaatctatatgaatacattagaattttgcaacattattaagctctagcagaagaaaacaagtagagaaatgtgaaaaaccagaccgaaaatgtccaagtagataattttcttaagaatgacgagattaactgtaattgtatcattattacaaagctaagtcttactaaagaccatccgtcacttcagatatattgagataaagctaataagaagccaagatcacacagccactctcaaagttcatgcagttagtaaacgacgatttgtcaatgataaaaactttcaaactctaaaaagcctcacaaaaaaatggaaattatttcaaaaagccgcaaccagaatcggcagtccggtttactctcttccccaggttcttcttagatcacaagattaatataaatataggcactgagccaccctacagcaattcataatgaaccctcaagaacatgcttatggacatgggatatcaaaccagaattatcagcaacaacaaaataataattttggtcaattaaactcaggttcagattggaataatgaaggttcaacgttaaataataataatagtaataatggtcataataacagttctaatagttattatcaaaataggtttaccgctaaattagaagagaattcaatatcattacctgctccatccttaaaccaacatcagtcacaaacaagtttacaatcttctagtcagaatgaaactcaaaataatggtcaaaatatacaagaaaattacaatccaaacaatagatcacacagttctcaggatcaaattcaacagcatatcatgcaaaacctcaatcaaaaccattaccaaaaaatttatcaacaacaacaacaacaacaatttcagcaacagcagcaacaacagtttcaaaattatgttaatgataactttaaagataatgatattacattcaaaaactatcaacatccgagcatggataataaaatatttaacagtaccttttctaaacaagatgaaatttctcatcaaaatgctaacagctcaagagaaaatactaacgtaaatggaacaaattcaattacatctaagcctcatactaacgtaaatgaaacagttttttctccacaaaatcaaacacaatttcaagaactacagcagtttcaacaattacatcaattacaacaattgcagcagctacagcaaatccaacaactgcaacaatttccacagtttcaatcattttcgcaacttcaaaatccccttttataccctaatatgttgcaaatgaatagtttattatccatgatgcagcaaaactctattgctaatcaaaattctacaggaaatagtatgagcaacaatatctcacagaaatctaaaccaaatgatgctagctcaaaacaagagaaaaatgaaaatgaagacgaaactggagatcagacgaacaacgaaactcttggttcaaattataatatgaatgttacaaaagacgaaaaaaatcaatctcaatatgatgattcaactcaaaatacaacatcacaacttaatcaaatacaaaagctccaacaattacaacaactacaacaatttcaacaattccagcaacttcaacaacttcaaaaattacaacaacttgcaccagtccttgatccaatgttatctgtatctataatggattcatttaataaatcaatgataaatcagtttcaacaccaacaagctactcccgtaaattatgccgacgattcactttctgatgatcagaacatcccttctttggaatcaaatcaaccaccagaaacatttagacaaacacaaccatttatttcatcatcaattccattgaatgatttacaatttcacctggagaataataataacaacagccactcaaatttttctgattctaatttaccaattcaacctcaactccacccattacagcaaaaccaatcacaatctcaacttcaatcacgtagtaactcgaatacttcttttgccaatctgagtcaagaaatgcctaattatagtaattcatattttactgcactgccaactgctgattatcaaacacatggagttttgcctcaaccttttgtgatgcctaacatgtacttccctaatatggctgctatggcaatgaatatgggtattggattgaatatgggtttgaatccaaatgtgaacacagggatgaatgtgaaaaagaagagtaaagtaaagaataacgatatacccatcatcaaaagacaagctaatacaagacatctcattgctaaatctaaaatcacatcaaatgaccctaatcaacctaaaaagtacaaatgtgcacattgcacatggtcatttatgagagctagtgatttgagacgtcattttaaatctcataaaaatccacaatatcattgtccattttggaatgtgaaatatgctacatgtccacacaaaaagtttggatcttttaatagattggatgtcctgaaaagacatttaaaactagttcattatagatatgaatttccacaaaaggaaaagaaaaagaatgtaatcaagaataaagatggagaagaaataaagactgaagaagtctcaaaagatctagctgaaaatgatacagaggaaaaagatagtggtttttgtttatcttgtgaaacatattttactaaagttaaagattttatcaaacatgtcagtggatgtgctggaaatacaccaatggaaaaatggaaatatcgtaaaaatggtgctattttgaatgtgcgtaaagttgatccagctaaaggaattgacgaactagagttacgaagaaatgtccctgtcaattcaacgataccttttaatgaaattcaatcaatgccaagttttaattttaggagtgaagatgacgaaaattatactgaagaagatgaagaagatgaagactcatcaaatgagaaaggtttgaatacagtgacagttagtaatggattaaaggcaactactgctgatgaaaataaatcgtacgtgcttatcaatgatgtggaattaaagcccgaggatatgaatgaagcattaacaaggaaacgtggtcgtcctaagaaaaataaagtgcctttgttaaactgataaactattcaatgattcaattatattttgatatagaataatatgtattttatataattttaatagttaatactttccaactgatcatactcagaataggatggtatatcgaaatggaaatggggaaaatttgttccatttaaagggtataaaacgttatcaccactcaaagcggcatcaatgtatcgatacttatcgacatttttagtatcatcgttgggagatttgctatttacattagccatttctaagtcttcatgcatgagcctattttcagattcattaaacctatcttcctcaatatccggttcaatttcattttcatctacgttgttatcactattgaatgtttcaatattatcagagttgactttgccaccaaagccagcattaacaagtccatgtatcacccacggattaataattcctgaaaaatggatttcaaatggagaatcagtaaataaagtaatagctcttttcatatcaatcaatgcttgaatagatgttgcatcaattgctacaacttgagagaaatccaaatgaataatattaagttttggtttattttgattttgttcctgagttgaattgttcttcgaataagtgtctttgttggattcaacaaattcttcattgcttttgtttccaatgttttttacattagccattaggtttttaaaattcatcgatttaggattccattgcggtaaagagtaattgaggtttgcaatctcgtgtatattattccaagtagcataattagcatcttttgaggaatggaaattatttttaacataatcaagaatgtgttcaacttgagcagagctgttaggatagataaaactctcactcattctataaaccactatacctggaggtggaggctgaacacaaacattgtcattaatatatcttgtgtgaacattacttgaattattgaaattaagattgaacatagacttcttatttataggaacccatctatacgtataactaattgaagttccatcatcggtattaactgttttaacatcttctccatatgcacccttgttacaactacctacactcataaaagaatctggcattgaaagcaaaccagagttggaaaagcttctgtcatttaaattattgtttaactcattcttattcttcgaatctgattctttaattatagttggattaaccaattgaacaacttttatacgtcccataaaaaccccattagtccaacacattctccaaataattagagcagcagaagcacacattgcaaagtaaataccattttcaattgaggagaaaactgcaataagaacaccaatcaaaaagatagcacaatccaaaggttgaactagaaacaatctcaaagttgatttataggaagccattagatcactaactgcatgaataataatagcacacaatgttgcttttggaatataataaaatgcagaagtaaagcaatatattgcaattaaaacacagaatccagcaaaaacggaagcaaatggagttttaacaccacatttagaagctaaagctgtacgtgaaaaagatccagtagcagggtatgcatgaaaaaaagttcctactaaatttgtgacaccaattgcaataaattcctgatttggattgattttataatcatgaacacgaccaaaagatttggcaattgaaatatgctctaaaactaaaactatagttgcaacaggtaaatctggtgcaattcttgaagctaattgatttggtggtgtaaaaacaccaatattatgcaaacctgattcaatgaaaccagtaactgcaaatggagaatgttctttatcatgtcttataattaaaaatgaaatcaaagttgaaaatatgataacaattgcagttctaacatttaaaacgtaagtccaaattaatgctttttgtggatatctatcaatcatatgttgtgcagtaaatttccaaatgtagaggatgaatagaccaacaataccaaatgcagcatcaactttagtatgttttagattttgtaaaaaatgaattacaattaagtaaggagcttcatgagtattgacaaggtgtgagaaacccattaagccgggcaactgacttgtaataatgttaaatgcagaacctgttgtaaatgccatcacagctggtagcggaatcaattcaacgagaaatcccaatcttaataaaccaactgctaaagtgatggcaccacataaaagagcaacagttgttccaatttcaggtgctgaatatattccaggatatttatcttgaattctatctataattttagaaacttccaaactcataactgcaacaggtcctattgatacatcctttgaagttgcaaaaattgaatacatcattaaaccaataaatgaagagtataatccatattgcggaggcaaaccggctaatttagcatatgacattgcttgaggaactaggacaatagcaacagagacaccagtgataaaatcggatagaatccattttggtcttgttggataatatggaagccatctagcaataggaaataaattgactaaataactttttgatctagagacaggatttttaattaaattttttgcataatctagaggttgaattacagattcatcataggaggggatagtttgatcatataagggtattgattctattgcagagctgtgtttactataacgactgtgtattttattgattaaagaagcctcatcatgagaatttccaataccaggttcatcttctggaattatgttgagatggtcttttctcgtgaatgggtttttcattatttaatatccaaaccaaaccagaacctactaacagtaagaaaggagaatgagttacaatacatgattcttataaaatggtcattactaattgaaggttgataatagagactcagatcaactatatgatatatctaaggaaaggctatagattagtaatatctggatagtaacaaaccgatttgatgaaaaattgttttcttattatacatgatgtagataatataccttaaataggaaaataatttcaccccaaaaggacgtggcacttatcaacactttccattgtcagtaattttgtcacgtgcaatggcgattttgaaaatatcataattacctaatgtgattatttctttgtgacttaatggtattgcaatgatgtcacttgatagataacgttcagagattatacatgcaatggagtctttgtaaagtctatataaaactatacaaccttgtctaaatatcacccatcgctttatcaagaagctctacaaagttaacacaatcttcaaatgtattgtaaagaggagttggtgcaactcttatgacattaggacgtctttcatcacatacagttccgtgtgaatgtaaatattccataactttttccatacaattttctggatggaaaagtaatgatagttgagcccccctctctaatggattagttggtgtgatgatttcaaatgatggtttatcactactcttaccataatattcactcttaagtagcagtttctctaaaaatcctgttaaagcaattgatttttcacgtaatttttcaataccaccataagcttcaaatacatccaatgaagaatttaatgatgcaacatctaagacacttggattactttgtctaaaacctaatgcactttcgattggtctaaatttttcctccattttaaatctattatttgcttcattaccccaccatccggctaatcttggacgtacctttaatatcatcacctttggaaagtctttcatgaacgaaaataccaccaataccacctggtccagcatttaaatatttagtaactacaccatgcagcaaaatctacattccaatcatgtaattttaaatttatattccctgcggcatgtgctaaatcccaaccaacggtacaacccatctcatgtcccttttgagtaattttttgaatgtcaaataattgtccagtataatattgaataccagaaaagcatactaatgcaatttcattacctctatcttctaaaacttttaaaatttcttcagttcttaaagtaaattcaccctctaatggttctaattgtaataatgtttcttttggatccaaaccctttaatctagcaagattatacattgcataataatctgaagggaaagcaccacgctcaaacaatatttttgtacgaccgcttgctatatcaggttgataaaaacttattaaaagtgagtttaaatccattgttaatgtacccattactgcaacttctgattctaatgcaccaacaattttggaaactttaggaattaatggtaaatctacatcaacccaatcagttgttatttcattacgaaaatgtgcttcaacaccacgagcagaccatgcatccaattccttatttatgaactctctagtggattttggcattaatccaagtgaattaccacataaataatttactttatcatcagtctcacttacacccattgatttccatgttggaaactcaaacttatctgccacagtgagatacttctcatccaatacacttgcttcaacactcattataataaacccacacacttacactctgcttatcaaagttaatttgctctaacaattaatgcaatcgtcaatgtcatgaaaatggaaaaaaaatccaaatttctccaaaccaactacgtcactcaacaccctcgaaatttgaatgttttgtgcacctgccaccaggccactgctaaactgagttaatttaattattgatgtttagttaattttaacatcactgacagtataatatacgtttgtcctttccaggtagaagtataacccccctctttaattaaccaaacacacatgtcgtcacaagattttgtcagatcgaatattttcggtacagtttttgaaacaacttcaagatactcagacctaaacccaattggaatgggtgcctttggtttagtctgttcagcaaaggataccttaactaatcaaaatgttgcaatcaagaaagttatgaaacctttctctactccaattttagcaaaaagaacttacagagaattaaaattattaaatcatttaaggcatgaaaacttaatttcacttgaagatatcttcttatcccctcttgaagatatttactttgtgacagatttacaaggtactgatttacatagattattaacttctagaccattagaaaaacagtttgttcaatatttcctttatcaaattttacgtggtcttaaatatgttcattccgctggtgtcattcatagggatttaaaaccttcaaatattttagttaatgaaaactgtgatttaaagatttgtgattttggtttagcaagagttcaagatccacaaatgaccggttatgtttcaactcgttactatcgtgcacctgaaattatgttaacatggcaaaaatatgatactgaagtcgatatttggtcagttggttgtatatttgctgaaatgattgaaggtaaaccattattcccaggtaaagatcatgtccaccaattttccattattactgaattattaggatcaccacctgcgcatgttattgatacaatttgttctgaaaatacattgaagtttgttcaatcattaccacatagggatccaataccattaactgaaagatttaaaaatgttgaaccagatgctgttgatttactttctaaaatgttagtatttgatccaagagagagaatcacagcagctgatgcattatcacatccttatcttgcaccatatcatgatccaactgatgaaccagttgccgaacaaaaattcgattggtcatttaataatgccgatttacctgttgaaaattggaaaataatgatgtattctgaaattttagacttccatgaaattgaaggtgcaggtgctttggataatgcaaatttacaacaatacgaatcacaaatactagaacaacaacaattgcaaggtcaaaatataattgcaatggatcaagcacaagcacaagctaatgcacaagcacaagctcaagcacaagcacaagctcaagcacaagcacaatcgcaaactcaacaaacacaaatttaatcaatgtcctgccatttcacttttctttattgtgtacactatgtaatacataaataatcaactcttttagctgttagtcgagatatatgtcgtgtaaattttgaaaggaatattatgcaaatattataataatacaaagaatacaaagaatataaagattaagaaaagtctaggatatttataaaagttttttgggggtaatgcaaataagctagagtataagataatcagtttgtgtaaaatctatctctatcacagtaaaatgagtttttgaaattagaaaaagaagattctgcattatgaaacgcatccgtttgagctagtttcttcatacaatattccagttgatttatcagttcttctgcttgtttgattgtttcattggtattatccagtggttcagatttaactattgtttcatttaaacgagagtatccgtaattattgtaggaaataagagtatttgtaaatggcatatttgaagattctgtactatcgtcttcatttagcatgtaaaatttattggttggagttgtaccttgtgtaatcaaattattattatcatcgtacttcaaggaagtgctttgattgaaaaaagggtttgcagaagtacccaattcttcattcacaaaggggtttatattcaaggtattcggaaatgcaatggagtgtgttaatgaggagtttgaaaaatctgtgtattgagaagataaattaaaaaaagaatcagattgagaatgttgcaattgatgggactgtggttgtatttgtggttgtgatcgctgttgttgttgtgattgtaatgggtgatgctgtggatatgattgatgatgacgatgcaatctctgttgtgttattgattcatcattattttcgttttcagtttgatttttaaccacatcactgtttcttttaagtaaacctgcattctttttaaaaatagataaccaacctctgctaaaacctgtttttcttttcggatcatcaacgccatacatttctgcaaatttaacccagtactcacgcagaatacgatctgtaattggtaaatgattagcaagacgttcattgacaacagacatcatagcttcgttaatttctttgtatttgtaaaaaggttttttcttagaattagaaataatttctgcattggcatttgaacggttagtagcttcttcatatctttggcgtaaatctgcttccttttgtagccaaacactaagacttgatgtagaaatggcatacttatcttgaaaatgtgtaacaacttcatgttgtgaataatcatgacttttcaaataatctaatatcataattttttcagccaatgttgaacgttgacgtttctttagaggttcatttaatacttttgattttttattagtgtcttcattgtcagtttctgttaaattttcgtatccttcctcaatatcattttgcatatcatcattcgatattgtcttctgaataactttttgactcttcgttatgtgatttccaattatgcctatgagacattaactttaccgaataagcagtatattagaaaaccactaatggttgaaaataaacaaaattgaaagtccttcatgattatatataaagtgaaaacttagtcattccattaacttgagatgattccagaagaatttgatgatttctccaaaatacagtgggagaccctttgaatcagagcgaagaaaaaacgaaaaaaacggtgtgattttccctggaatttccacgttttactgcccacggtgaccaagtcagcagatcgagttcttgtctcggcgttccactatacgaaaatttcattccgataccactgcttccgctgagagatcagggaggattataaatggttgtccacgccattctatcccactcccacacattgcaatgatccacacaggtaacgctaaaatctctctcaataaccataacatgaaaaattttttgtgatctttggaagagttgttaaaactctgtaaccgatgatattgtatccaatcaattaagtaccatatcatcatatgaaagaaaaaatatacccataacggcattagctccccattcatcaaaattgcattaattgcaatactaccaataagcccagatactaagctttcagttgtaggttcaattaacgttgctgccataaccatatattttctaactcttaaccaacgtacacgtctatccatataatctctaaccttgttttgtccctcaattggttgaataactatatcacaactcatacctgaacatccatccacaccatcccacagagcaatacctatcatattatcttctcctatatattttgcaaaatgggataaaccttcacctttattaactactatattatttaatttagcaactgaataatcaagatcagatcttctaaaaatatttgatttaccattgatacaaggcgcaggttgtaatgtatttaaagcgacataaaatttagcatgtgatgttgacataaacatttcgtcaagtctagcaccccaattaatcatatgtttagattgacattttactattggaacatgggttatagtcttaacttttttactatgaaatggtaaaacattaggatccattgtttaaattgttttgcaatgaatatattgaacgttgtaacgtgtttctatctgcgtaaacgtttgagtccatgatccacataatatcaaatttcccagatttgtaacctttatgtaggttatttactttgggattaggcccaaaataatctaaattattttgattttcatcaattaacagttttgaatcaacatatggatatttattgattaagttttcaacaattggaatacatggatcatttttggactgtacgcagaagataatttctaatttatcagttggatagttttgtagaaaggaagattctaaacattttgtcatctctgattcaatacctttaagtggcctcaaaattgttacaccttcaagtgttgttggatctattttagaatcaagcttttcttgtgcattcttagaaatacatcgcataatttgcacaaatcccaaaattacatgtatcagtacaaccacatacagaatgagcaatggaatacataccaaaactatcaaattcattgccttggtttcttgatgccagaaggaaaaaattgatcgattgaacaagtgaaaaaatataatttgtttgacacttgacacctaacgtcttacattttccgcaaaaaagccctattcgtcgcgtcttatccaccagagttattccgatggtcctattagctaccctatatactttgtaatcgatgatctgatgacaagacaatacgaccgttgaagagtggataataataaaaaaatcaaaaactttgatatgttatatatccatatacattaatgtaaaaaaaagtcaaactgcacttagtctatataattcaggttttattttagtgcagagaggtttatacgttttgaataaagtttcaccatcttttgcaaatctttgtatcattctaactctttttgggataatgacttcccagtagacattactattatcattagaacagtcaattttaacagtacctatattatccaatactaattccatattattgtatccataaataagatatctctcctttgaatgatctttgaatattttcacactttccttatcatataatcgtttattaatttcagcataatcaataactgatactttaccttggaaatttttcaaaattttaacatttagatcattatcgggattatttgtccagggtttaagataaattaaatcaccaatagagatacctttatgataattttcttctgatttggggaatacgttagcctttatcttaacatctggattattattcaactcttttattattttttcgtcatcttttggattcaatgttcgtaaaaatctagctccgaattgattaacatgaccccatataccaccattatgacgtgcaatcccgggtgtatcagttaatgtcatacctgggaattgatacgtttgaaatgaggacataaacgggattggtgaaggttttattttagtaaaatcagaaacttttgtaaagttttgccatgattgattactcattaagtcattttgaacacattttagtatttctctagttaatgttgttttaccagtatttgtttgtccgataatataactgtgtttcaaattatccatatcaatacctaaattagacataagatcatctaaattccattccgttgatgctgaaaataaatgaagcctatctggtgatattttgaatttatttagtttgtcaagaacagaatttgattttatttcatcatcagttattgattctatactattgaaaaatccattcatatacgtattcaactgatgaataatattttgtttaataggaagaatatcactatgtaataccaattgtgaatctagtccattaatacataaatcataatctgtaattacccaatgaatattttcagttaatataccacgcataattaataaaacaagtaatcttctatgtaaacctaatggaaaatcctttgcagaaatacacattattatcttgatattcgataaatttttcggtcgtatatcatttaatgaattatttgatttaccaatttcatttgaatttcgtacatctctattaatataagatacaacactctctatcgttcttggtccattatttggtgaaaattgaccaaccttaagtaatgttctaatatgttttggatatttaaataatggtttatcacccagtttaggggatattctgaatggtattttcattgatccataaagtgaaaagagatggattgccttataagtctgagtaatactaaattcatgtagcacgatttttttttttttgaaattttgaaaagtaccatttttcattaaggaccccataaaaaatatttattttttggccaaatttttgatgataagttatatataaagaagaaggaatagtataatatacagagtgcgaatcttattaatattgtgtatctatctattataatatataaaaattattttaagaatagtttgaaaacttcattattagtttcatcagtatatttataacctaatttatcaaggaaatcttgaaattcatcatcttcatgttcaggtacactaataccagttaaaactttaccaatatcatcaccatgattacgataatggaaaagtgttaaattccaatctgcttttaacatatcaaggaaattatctaaagcacctggacgttctgggaattcgaaattgattaaacgttcacgagaattatttctaccaccaactaaataacgaccatgagatttagccatttcattatcagttaaatcgtatgctttgaaacctgctttctctatatcagttaaaacttgttttaattctttttctttatcaataactgagaatgaagtataaacttcaacaatttctccatcattatttgagactctacaagagaattcagtaacatttcttggatgaataacttcttgtaattttttgaaagtaccaggagtatcaggtatttgaacacaaaggaaaacttctttaccctcacctaaaacagctctctcagaaacgaatcttaatctatcaaaattcatattagcacctgataagacagggacataagttttctttgaatgatcaatttgaggattttcagcaatatatcttttcataccagcaactgtcattgcacctgaaggttccataagagatcttgtatcttcaaaaacatctttaatagctgcactaatttcatcagtattaactctaacaatttcatcaataccgaattcttgacaaactctaaaagtttcttcaccaactaatttaacagcggtaccatcagcaaataaaccaactttatctaatgcaactctttcaccctttactaaagattgacgcattgcatcagcatcaaaagtttcaacaccaataactttaacatgaggagctaatcttttaatatatgaacctatacccgcaatgataccaccaccaccaattgcaacgaaaacggcagataatttatttgatttaatttgacgtaataattctaaagcaattgtaccttgaccagcaataaccaatggatgatcaaatggaggtatattagtataaccatgttcaatttccattcttttacattcttccttagcagcatcaaaatcatcaccatataaaacgactctagcccccattcttgaaacattttgaaatttaattgaaggagttgcaacaggcataacaattgttgcattaatacctaattttttagcagaataagcaacaccttgagcatgattaccagcagagcaagcaataactccctttgtacgtaattttggaggtaaatttgcaatcatattaaaagcacctcttaatttaaatgagaaaacaggtaataaatcttctcttttaagataaacattagaattagttttatttgataaaagaggagcatgattagcaggagtttcatctaatacatcataaactcttgaagttaaaattaatttaaaataatctggagttccatcaggttttaaatctgattctttaagtgaaggataacgagataggaaagatgaattaaaacgacgaaacgatagtagtaaaccacttgaatacttcattatgaattgtggtatagaaagtggatatacctaatataaaatatataaacctgataaaataaattaaaatacaaaaatacatcaaactaaattaatgaatcatcgtgtcaatcaattatcatgatgaaaaattaatcataaaatgatatatagaaaatgaaaattgaaactaaaactgaaaaaacgtcccgtctccggcccggtgttaaaataaagaaaaagagaaaaagaaaatagaaaaagaaaaagagctgaagctgaagctgagataaaaatcgcaccatattaaaaaaagaaaagtaaatattgtattacctaatcaaagtccgaatttttttaactggcctctcaaaggccgccggttatcactcatttcgttccgtgccctttgacagaaataagagcatgtatctatctagtacatttttctgatgggtatttaaatatctccatatttctcttctttaatccatttcttcatcgtatatatcgtataaatttatcgtatatatatcatcttatctaatataagtttatcattaaataaatattacattttattatattattctcttatatttctcttttttaaaactatcaataaacattactaactaactaactaactaactaactaactaactaacatatacaatgaaactgattacagaagaagaaaaacgtgctcataatagatctgtccttcatggtggtttaaaaggtttagctttaggtacagtcttttcattagcaatttatggtgcagctcctcgtttttatccacgtatatttaatttaccttggtcaattcgtactgcaattttcgttataccacctgcttttactgcttcagttaatggtgaattatgttcaaatgaatttgattatgatatgtattcttctgaagcttctcaaaaaagaattttaaatgaacatcgtagatgggaagctttatcagcaactgaaaaatgtattgaagttttatctgaaaaaaaatattcaattattacaggtttatgggctgcttcaatgtgggggtcttgggtttatgttaataaagatcctctgttaactaaaactcaaaaatttgtaactgctagaatgtatgctcaatttttaactgttggtttattattaggttcaattggtttatcaatgtatgaagaaaaactgcaagctcaaaataatcataaaaaaattgaatttgatgcaaatgatgaagctcttgaagaagttttaaatcaaaaataattttaatttttcaaaaataatttacactaaataacaatgactttatagaatttaatacctatataacctaaacgataacaaaataacctagtaaaataattgtaataccaattataactgtaataattgatgcaccagctgtatcacctttatctaaatctaataattttgcttcaggtttataagttgtattacctgataaaacatcacctctacttgaaccaccatctgtcatatttaaaattgtatccttaccaaaattaatcattaaactttgaataacttcaagtgcactcatttcttcacctaatccataataagtatcccatccactatatgaccaattcataccacatgtatgaccatcataacctccaacacatgattgtgcaactgctttagcagttgtatcaaaatatgtattaattgtatcccttgaatcaggtactaaaactgctgttaatgctaaaaatcttgataaatatgctctaaatgatctttgatcagtttgacatgtatgatgtctcatacatgcactttcatacataacaccatattcatcgaaaaatacatttgcacctgaaacaaatcccattgtacgattataccatttttcttcacctgtataattatacatatatgcactacctgaaacaactaatgctaaattatatgaccataaataatatgtcatattagtacaatcaccaacaacttgtgcaccatcatatgctctccatgtattttcatcaagaaatttaacatcaagtaaccaatcataagttctatcaacccaatcaagataataagaatcattacctgtatatcttaataatctagcacctaaatgaaataatccagcatttgaaacagtatttttataatcataaccattattccattgaaaaatttgccatcttaaaccaccaccacaggattcttcatcccatctatttttcattgtattaaaagttgcagcagctaaatctaaccaacttgccgcatttgaaggtggatttgtaaaatttctttcagctgcttgaattgctgcaatcccccaaaaaacttgatcatcattaccttcagttgttgtttgatttaatggcataaaattattatattcacctgtttgatatagaattgcttcaataattgtattggtataagtatcattatcaaaataataacaataatcaatcattgaaccaagtgcaccacctgcttcccaccaataataaggatgtgtaaacataccaattgtaccacctggatctttaccccaataataatccataacaccatcagctattaatgcagctgctgaataaatagaatctggtgaggtaatatttaaatcaatagcggtaactgtacttaacagtaagggtataatactccaaattctcatccttatacaaaagatttactttaataaggattaaagtgtgatcaaaaacaaagttaaaaaatcaaattaaaattaaaagtaaaaattgatctcaatgtcatgatatgatagtagaagactacatgtaataaagaaaaaaaaaagaaattttcgctatttttaatacttacccccctcatatacgataatccattacatcactagagtatataaatatcagtcaaatgctatataataactgttatattataatgtattaaaagaataataattaatagtaaatagtaaatagtaaataataatatacacacacacaaacacaaacacaaacacatcttctatataagaccatcaggtaaccccactgcttcctcatgtaatggattctctgtcgtctcttcgacatttgtatcaacaatatctatagtattaagttcggacggggcttcatccttataatcgggattcccatgttgtggtgttggataactttgttcataaagttgtgcaatatatggtgttgctaatgttgtgccattattactactacttgctcttcgttgtctatattttgctaaataaattttaagtacttcagcataattttcaaatcctaatgcatgtaatgaacaaagtatatcctctccattaacagttttccgcttttctagtaaacatctctcacatgcctctgatgtaacaaatgcaataaattcactaacacattcttgcatacattcctttgcatctttactaactttagcggatggtggtaatgtagctttcataatacgtgctacatttgcaatgggtagccatctatcctgttcccttagttcacgatccatttgttgtaaatagaaggaaaaaaaagttaaaccttggaataaaagtgttgatagtggtggaggccttgaaaattaaaataaaccacggtattaataattatcccaatgcggaaactttaattgtcaattactgttatataccttttgccaattgatttcttttcaatttgattactagatataaatatatatatatataataatactctatttaacaaataaacacacatgagtgcctcttttatattaccactggttgctcgtggatcgtcatttgttgctggtcaatggttagtttctaatacttctccgtttcaagtaggtttcgcttcagttcatgattcagctttagatactgctttattattagctagagatacttcaagagttgctagtttatcttcaaagaataactcttcaatttacgcttattattcaattattttttttgctttaacatcagcagttttcatatacccattagattcaccatttcaaccatttattgcaggttgtcttgaattagctgcggaacatgcatttctctataattggtcaattagtcgtcgtttagatattaaagcttttattgatacttattcaactatttttaaatcattagttcatatttgtttaataaaattcttacattatgattatttccatgctgctttaattgcaagaatcgttttctcattttgtttctttatttcctacacttacattcatccaccttcgttaccagttccaaaaattcaatttcttgatgatacatatatctccatatttgttcaattactattcaaaaacattctttcaagagctgatcatattataatcgctcgtatattagatttacaaagtcaaggttcttattcgtttttaactaattatggtgctttaattgcaagaattattttcagtccaatagaagaatatactaaagtttccacttcaagtattgcacatctacctgttattatatcgttttatttctatttatcaatattcattactatttatgcaccattaaatacttcattatttgtcaataccttctttcccaaatttaccacatctatacctgcttttaaactttattggttgtatattccatttttggcaatcaatggtatatcagaggcattatatcaatctttaaatacttcaaaggaatcaattaatcatcgttcacgttttattgttttaaattcaattttttacatttctacaatttacattacaatctcatatttagatttacatatttatggtttaattatagctaatatattaaatatgtttacacggattttattctgtcattttaatttaactattaaaataccattatttgaaaaaagatacattatattcacacttatttccttaactgttgcaatatttcaatacaagtactttaatggagatgtcaccacattaaaacagcttatcatttcaggtatcagtgctgtattactgttgttatgtgcattattcaatgagcgtgccctaataaagtcacttatagctgaatcatctaaaaaatccgaaaaagttgaaaattccgagaaatctgaaaatcctcaattagtaaagaagaacttataatttgttaacatttcaacctatatatttggaactccactttgattgtattacatttatcaatagcaaatgttcaaaagattagcttcaacattccgtgctggtcaacccatttatgagactagacctcatctgataaaagctggtgatttaacaccaggaatatctgccctagaatattataaacgtagattaaatttagctaactcattaccagctgagtcattagctataatacctggtaacacaattaaatttgcttcaggttcagttttctatccatttcagcaaaatacagattttctttatcttacaggttggaatgaaccagattcaattgcgcttattgaaaagccaacatcagattctgataaccatatctttcatttatgtgtaccagattctgatccagccgttgaacaatgggaaggtgaaagaactggtgttgatggtgctcaaaatattttcaatgcagatgtttcagttccaattgaaaaatttagttcacatttagaaaaattactaaaaaaatacacaaatgtttattatgacacaactggtggttcagcaaattcaaaatctcataatttatttcaaagaatgttaccgtcaaattcaataaatggttcacaatctcgtgatcgtgttaatattgaagaaatgttaaaatctcacgcaaagcaaggtttcaagttaagtccacttaattcattaatttcagatcttagagttattaaatcaaattcagaattgaaaatcatgagattagcaggtaaaatttctggtagagcatataatcaagcatatgctaaaagattcaaatctgaaaaaggtttacattcatttttagaatataaatttattaatggtgggtgtgataaatctgcttatgttccagttgttgcaggtggtgatcatgcactttgtattcattatgttcgtaatgatgatttattaaaggatggtgaattagttttagttgatgctgctggtaatttaggtggttattgttcagatatatcaagaacttggcctgttaatggtaaattttcacctgcacaagctgaattgtatgaatcacttcttaatgttcaaagaagaattattagagaatgtactgttaaaaaaggtaatagtcttaatgatttacataatttaagcgtggatttattaacattagaattaagaaatgcaggttttgcaaatttacaatcctgggaaacttcaaaatatctttatcctcattatattggccataatctcggattagatgttcacgattgtccattatattcacgttcagtaaaattacaaaagggtcaagttgtaactgttgaacctggtgtttatgttccgaaagatgatagatggccaaaagagtatcaaggaatgggtataagaatagaggatgatgttgccgttggtgatgatattaacgtagttttaacatcagaagctgcaaaggaaattgtagatatagaaaatattgcttcaaatggtgttaccactaaaattgaagaagaggtcactgacatttatagtttataatcaatacaaaatattaaaacatgtttatagaatcatttaattatttatcaatttgttcacttgaattgctttaagtcgaagtatttcacgttgaatattatgatgaatgtttgctacatcatcatcgatagtaaccttaggaacatatacaatagtatcttgctttattgctaagggtaaattcaatacagtaatcatattcataattttttcgaacaaaaattcataaggtaattgaagaaactcacaaagttctcccacttcaatttcttgaataacagataaatactgcatgatttttttctgtaataatagctccgatactctgtcaaaagtttcattcaatagcaggcaccatttaaaatccttcaacaatatatctaaatttgtatgatcattattttcataatcttcttgtaattttcgaacttcaggatcatcaaagaaaacttcataaaacatcttagagctccagtatttggatctttgactattcttttgtgtcaaaataatacacagtgtgatgactctaaatagtccaattacatcaataatactttcaacaattggatcaaatgattcaattatatgagtttttaaattgtcaaattgtttaaccacatcctcataatcaccgctcaaaaacattgcaaacattaacaaccattgtaattgataataagcttccatttcctccttacttatcaaactactatcctcatattcattaattattgaatcacacttttgtaaaatatgattccattgataaatcattgaaacatctatccacttatagcaaaccattttcaacaaatgtctcaatttatattttgaatgaaactcgagcagttcattattcacagaatatatcaatccaacaatatccagttgaatgagttgtatgttattagttatgatccatagaagtaaattacgacgttctaatttttcgtacaccttatggtataattcgactgtacattcttcagtattagtgagttcgtcaattagtttatcatagtaatataaaacataatcttctgttaaatcttcaggtttttctatttccatttcattcaatacatatagcaattgtctatcataaatattcagtgatttattttgcgcctggaagaatgttggtatttgtggatgtaagatataaatggaattttcataatcaaaaagggattctattatttcatccaagccttcagtatcatcatgggatagtttgtaaacagcacgttcaatgataaccggcgtcaatttcattttgtctcgacattaaagttgatacaccaagaaagataaacattaccaaagatgaatagaatcctagaacaggaactgagattctaaaattatatattatggaacttgataaaaaaaatttgactgaaatttttcataaaatctactattaatttttctttatgaataatgcaaacactatacaacatacgaaggtttagtacttcatttgtcactaatggagtacgaactaaaactaaggttcttaaatctgtgcaaagtgatcgtttaattgtcgattttgagaaactagaatcaaagaaattgaaaaaacaaaaagatttcaacaatacaccagttgtagatgcatcagcacagaagatattatcagaattacttggaagagagctacctgaaaatgaaagtatcaattcaagaaccccatttacagctaaagaattattaactatttataaacaaccaaatttacgtttacaatataaagttttagggacctctgggagacaaatacaggattctttacttgttgataatgatgtgcaaaagtttttagaaagagatgatcttttaagagcaaaacaacttgcaaagttagctagatttcaaggtttatttgcttatggtacaattattgaatatttattaaagaaaggacaaattaatgatgcttttgatattttcatgaatttgaaaaaagcagggtataaactaaagggtagattttacaatattttgatttctggatatgctgatgctatttctaagaggggtggctctgcagatgtttcaaatgcaaggattgaacaattatatagatcatttcaaaaagatcatagtgattataacagtgaagtttcaatcattcatgtaaattctttattaaaagttttcagaaaagggaaacgtattgatcttggtttgagtttatatgattctttaaaacatttaagagatggtaagaacaggttaaaacctgatataagaacatatactgaattgataagattattatcgattccttcaacaccaactgatattgatagaaatttaatcccttttaaagatatagtcaatcgtgcagaaaccgtattttttaatgcacaacataatatgcatatcaaattagattcatatttagtacgtgcatatatcagtttatacgcttattgtggtgatttaaagttacgtgctagaacaattaccatcatcagagaatggtatagagtttcgtcaattgaagaaattaaacaacagatagatcataaagtttatcataaaaaactttgggagaaaattacagttgatagaactcgatgtttgaatgatgaagataatgtcagacttttatcatcaaatgaaattaaccataataagaccaaaagatttgaccctgatgaatcaattattagaatttataaagagctctgttatcttttcaaaatcccatgtacatattccgaatctgctaaagttccaaaagatgaaaagaaaaaaataattggtaaggtaaacttaactgatgataagttaaaatccggaggaaagaaagctgccgaacaaagaccaaaatctgaagcaaagatatgaaatatttactgctgtgtattgtatatactgttcctacaattaataaaaattacactataaattaagttttatatcattttcataactttgctaactccgtcatatcatattaccttataagagaaaattctttttgaaatttgatgatatcaaacctcaattttttacaattcactttttaagtgtaaattttataattttaaacactggttacaacccaagaagcattgaaaacattccgataactccaaatataccatatagaccaataaaaaaacaaatttgtaaatggggttggtcaaaacaatagaaaagaaatcaattattgacaacaggtgataccatattaacatccttgaaaccgtaacgcaacttttaatttttcccaatttggctattcacctatcaaagaacatgaatggtgaatcttgtttccagtgactattcttcgtaatgtttccatgattctatttataagttaatgatatccttgctttgaatgtaggaaaacaaaagatgtggattttgtggtaaaagtgcttgctatgctttctttaaatattttattaaattgctttttagcattatcacttaatgttaatgcagctgctattttaaaacgtgatgatgatcaaaataattatatttatgcaaatttaacagatagtgacaacagttttttgattgatctaagtgttggttcagattctcaaaatgtttcggttatagttgatacaggttcatctgatctttggttcccatcgaatgataatccatattgtcaaaactcttcaagtaacacgactgaaattagctccgatgatcaaattgactgttcagaatattattcatttaatccttcaaatagtgatacattccataaaaatggtaccgaatttaaaggtgaatatggtgatgatgtaattgcagatggttactatggtcaagacagtatttcaattgctggtgttgatcttccaactgttaactttgcagttagtaaccttacaaactcaacttatggacatttaggtttaggttatccaattatggaagcagctgaaaatgttaccagtgattatgaatatacaacattcttacaacaattagttgatgatggtaagattttacaacctgcttattcactttatttgaatcctgatgcacctaaaattttatttggtgcaattgataaaaagaaaattaatggtccattatatgaactttacattgtcccaactcaattgattaatggtgatgatgtcggtactttaaccaatattgcaatttccatgaatcatctttcttatatgaacggagataatacaaatgttattggtggtggttattatcctgttgttttaaattctgctttagatcaccacgttttccctaaagattttgttgatgcaattagtcaaagtttaaatcttgaatatagtgaagaagattattactatattgactgttctgaaattcaagaaggtaactttttaattgctttccaaggtgcagaatttgatgttccagcaacttcatttttccaagaaattgttaatgaagataatagaggtaccggtgtttgttatttcaatgttgaacaaactgataacgaatttattacaatgggttcacaattcttacaaaacttttacactgttgtcaatttacatcaaaataagattggtttagcatatgctgcagaagcaaatgatgaagatattgaagttattgaaaatgatattggtgataccgtttatccagaatatgatgaccattatggtaaaggtcattcaacttttagtttctttgatcatgaaactttaagtttctcagaaacagcatcatattctgcacctgctcaaacagcttcaagtacaacttcgactagaaacgttggtgctgttgctcagaaatcaactagtttatcagttattgctattttattttctttattagtttgatgtaatattaattatttaattatttaactttagatatttaattatttatttaaaaatcacttgatatcgccctaagtgtatcatcatcaaataattcttcattggttttcactttcctactgatataccaagcaccaattgttagtaagccaccaaatctgaaaaacccattctagtgaggtatcgtaattattgctgtctttgttatggaaaatagtgaaaagaattgaagacatgaaagaagagatcatttgtggagcagacacaaatacattatgtaatgccaataatatacctgaatcgtactctatgttattataataatctatcaaagattgtttgcaataaattgaattttcctctgtcatcaaaggagcatcatcttcaatgattggaatcattctgaatttgttgattatagtaaatctgtattgcttttatatctttaattctacttatttcttcactaattaaagaaaatggaatccaaactgcacatccccatggtataccagtaaatgcaaatactataattgcagcttgatatgtatgaatgaaaaacgtggataatgtacataatgtgaaaacaacatgtgaataaatccaaagagaacgtaaatttagcttaaagatggattttgaatggaacatacttgaatgatcatgaatttgagtatttcttcagtataattggtaaaaatgatacgataattaaggagacaattgagttagataataatgcataagttccaactcttgttgattcattcaaaagttcatcctttagttcaggtggtatcagattcggattagggtatcctttgttatagagaaacaattctccaacatatgaagttgtataaaataataatggaaaatatccaatccatgcaaataattgagcgtaacatactattttgacctgattaggtatagttttgaatgatataaagatttccttgaaaaagtttattagttgattaagtactgaatcatttaaagaacttttgattcccaaagagtttaatttattattattagtttcacgttgattgattaatgtaacatccgtctgtggattcctttctttaattaaatagattgaaaatgaagtcagaagtatcattaaaaaagcaacaatgattgtaagtactttaaactgtgaatcccctaaaaatgggaaaatttcaatcaaatttaaagttcctaaccaaaatccgaataaattaaaaattccaatcattctagcagcccaagcatttgcaacttgttgttgatcagttggaactacatcaacaattaaagctcttgaagaagcttgtataattgcaattgagaaatctaaaatatagataccaatacatgcaaatacaataataaaagtattcaatgattcatttgataaattaaaaggtgtcaaaatccaactaataaaattctttgaatgagataaaaatattaatgaaagacaagttaataaacaaccgattataatgaaaattctccttctaccatatgataacatacatctatcacttaataaaccaacaattggttgaccaattgaacctgataatgggccagctaaccaaactagggataggattctctttgataatccaagagataaaagaaagggtgtaacttctgagaattccactgaccaagataattgaagtgcacctaatatgagtgtaactgttaaaacataggcagttgatcgatgtggattgtataaatgcttgcattgtttatcagaatcatccagattacattaaaaatcactcattaatcgattaacttcaatttatggttccgtactccgaaatagagacgcgtgaaatttaatttttatttttactatggtgttcttcagtgatagtttaaaaatatttacatcacgttaattatcagttccttcctgttggtatagtaatctgcaagataacacaatgttaggtaaaagaggaatagatgaagttgaggaaggaatgtgtatatgggaaacgtacacagagaacaaaaatacacactgaagctcaccagaaaactgtggcatttctgatgtcagcgcaaaagcagaatcatttaacatattcacaagattcacaagactctttgcaatccctatcgcaggacagtaatgtattgtcagcagatggatactgatactgatactggttatgatacatggaaacagaaaccatactggtgaatgaataatataaaacaacgagcctctggtaagcgtcgctgggacggtcttaataagtgaaagcgcggattatagtggagataggaaattttaaaacaaacaatttaaagagaaaaccactgagagggaggaaggaggccattgggaagaaggcttttagttggagattctattgtagaatttgtactattgaacaacaataatctgtgtagagtcaattgaggtgaacaatcaattgattttgtaaataaaaaatataacgttgataatataataatataatataataatataatgactacatttgagaaactggttgatggtgcaacaaagattaaattagctccaccaaagcctaaatatgttgaaccaattctaatgacaacatctgaaggtgaaagaagtgaatcatttagaactgttatgagagctttgaataaaagattacaagattctgcttggacaattgtttacaaatcattaattttaattcatataatgattagggagggtgatggtaatgtttgtttaacatatttatcaaatcatctaaatattttaaatgttaaaattggtaatggaggtaaatttatttcaaatggtggtgatttaaatcaaatttatacttatgataattatttactaacaagatcaaaagaatttttaaagacaaatcatgattttattaaggaatcaaagaaaccttatggttcttggaactcaaatgaaaaatcaactttattaagagatttaacaattgataaaggtttattacgtataactgaatcaattcaaaatcaaattgatgcattattaagatgtaaatttagggaaagtgaagttaataatgatttagttattttaagttttagaatgttgacaactgatttaataacactttatcaatgtttaaatgaaggtattttaaatattttagaacatttctttgatttaagtaaaattgatgcagagagagcatttacaatttatgaacattttactaaagaaactaaaaaagttattgaatttttaagaattgcaaaacatttagaatcattaactaaattgagagttccaactattaaacatgcacaaacaagtttaactgaatcattgaaggattacttacaagatccagattttgaaataaatagaagacaatatttagctgaaaaagaaattggtaagagtaattcacctattaaaaaatttgataatgtttcaaaaactggtcaagaacctgctttaaaacaacctgtttttgaacaacaacagttagaacagcaagcattacagcaacagcagcaacagcaacagcaagcattacaacaacaagcattgcaacaacaagcattacaacaacaagctattcaacaacaagctattcaacaacaagttattcaacaacaagcactacaagcacaagcattacaagcacaagcattacaagcacaagcaactgctaatgcaattacaaataatgcaacaggtattgttcagcaaactaccggatttaatccatttactaatatgaatacattttcagttcaaccaattcaaaataatgtacaagtaccattaccacaagcacaagtacaagtacaacatcaaccacaaccacaatttacttcacaaatgataaataatatgggatcaacaattccattaaatttacaaactccaactgaaaataataattcatttatttctaatcctttgttacaaccaagagttttatccaataattttacaggaaatggatttggtaatgttaataataatgttaataacagtaatataaataattcaccaattagatcagcatcagttacatcaagtaataatccatttagtaatagtagatttagtacaacatcaacaacaactgcattcactaatcaaaaagatcaagaatcaaatgttaatagaaatagttttattaaacctacatatacaggtacaaatccatttagattagaaactggtgttaataataataatatcaatagtaatagtacattaagtacagtaaatgagattagaccacaagtaacagctggtggattagagagattaccaacaatacctgtatttcctgaaacacaacaacaaatgtataaagaatcattacaagaacaagctaaaaacaatttaaatcaaggagtaactaatacaacaattgcaaataatccatttagtcaacaagttacaggaatggttcaacaagcacaaaatcaaaatcaattcacaggtcaaaatcaaggtcaattccaaaatcaatttactgggcaagcaccaaatcaatttacaggtcaaatacagaacttcagtccaaatccaaatcaatttcaatttcaacaaggatataataataataataataatgtctataatggaccaaatttacttggatagaatatactttaagataattagatgtataaaaattttgtaacaataataaaaatcgagatagttaattacaatttaagagaattagataaataaatgataaatgaattgatttaaaggggaatatatattatattataaaaaaaactatgacataaataaatgaataaattttaatgatataataataagagaattgaatataataaagtcgttaggaaagcattaataataatttgaatttttaaaagttgctattaattaattaattgattaataaccagcagctggagtaaaatctcttgctttaccagcacctttttgagcataatttgctaacatatcatcatgagcttgatctttattataaaaatcagttttataattatgttgtcttcttgcttccatttcttcttgaattaaatgattattaattgcatttgcaaatgatggtctacaatataatgtagttaaacttaatggaactgcaactaaagcgacacctgcgatgaatttaactggagaaatagacattgttaataatagatttgtttgtttgttgtttaaagattagataagataagataagattggatctttgtcttgtttggatgttgaaagaataaagttaaaaaatagaacagagaattatcattttaattacatggggggtatgagtacatttatatagtagtgatttaagtggggaaatataaattgatgagacgatgaaagaagatagatgatgatgagacataaaaggactagtaaaaatggtatgatcagataataaattaataaactaacaaattaacatgacatgaaaacattaatttgtataataataaccagtccacttaagattgacatggttaatactccggagtaaaaaaatattttcttatcagagaatgatgttattttattttggtggtgttattttttttttttttttaacagtggcgagatttttttcatattggtattagttaaatagggagattattttattattttattattacgtaataattaggtgattatgtaataagtagtattgattacataatactaatcacgtgactgggtgctaaatatttttattattatgtaatcattttatattttcccacagtatattctagaaggaatatccctttttgccactgagagtaacttaagcattacataattaaagaatttttaggaggacagttcatgacaagtttatagtcgattttgtgaatggagttaacgttggttttaattatatttctaatgttttattcttttttaattcttttattccttttacaataaaaaagatgtcagattgggataacgttactatagttggtagaaaggcaaaagttggtggtacaggtccacgtgaacatgttattaaatcatcaagtcaaattaatgcagctagaagaactggtgcaattgtttcaattgataaaaaatatggtatgggtaattcaaaatcagatcctgaaggtcaaagattaactaaaattgatcgtgctgatgatatagttgtaccaaaaaaaattgaagcaagtgttggtaaggcaattcaaaagggtagacaagataaaggtttttctcaaaaagatttagcaactaaaattaatgaaaaaccaacaattgttaatgattatgaagctggtagaggtactccaaatcaacaaattttagctaaaatggaaagagctttaggtataaaattaagaggtaaagatattggtggtcctttatttaaaaagaaataatttctgatttctatacaaatatatcttaaactttttatataaaaatacaataataataatataattatttacgactaattctaatattcctacttctacctggagtaacaacaactgtttgtttccttctacctcctccaactaaatttgatacagcattggcagctaatacacctcctgcaactcctaacattgttttaccaacacttggtgtactgccatatgcactacttgtagtagtattacgactattattggtagtatatcttggatcatatcttggatcatatcttggatcatatcttggatcatatcttggatcatatctatcatcatatctatcatcatatcttggactttttcttgtttcaacaggtacatattgaactggttgttgataaactggttgtactggaacttgttgatacactgtttgtattggtacttgttgtattggtacttgttgtactggcacttgttgaacaggtacttgttgaacaggcacttgttgaacaggtacttgttgaacaggcacttgttgaacaggcacttgctgtactggcacttgttgaacaggcacttgctgtactggcacttgttgatatgtctgttgagcaggttgataagatttttgttgagcttgttgaattggttgtccactcacttgttgagtttgaacttgttgaacggtttgacttttagtttctgtataagttggtaattgaccttgatttggtggttgagtataaaacatggacatatctactggatttccatttgcatcatataattgttgtatttgtgacatttcactctgtcaaatagatagcaatataaattcagctaacgaaatatatctgggcacaatactatcaatttataataattgtaatctgcaaagacacaacgtgatgccgtgatatcttaggtaaaaattcatgttgagccccctttttgatcattgaaaaatttgttctccactgagataacacaatcaaagccttttattagtgtatttgtttgggcgtatgtcattggacttaatacgtagggtatattatgaaggttgatagtattctccacggttatattcctcttgatgtattgtttccgtcagagacttgaaataaacgtttcatttctcatttcttttgtaatacctcagtttctaagaataactttttaatatgataatttcaatcattaaaatgatgtaataatctattgtacttcaatcataatttactgtaaaatctcagttgtaatcaatctgtgatatactctacaacgcaacaatataccaaaacagccacttcacttccacttccacctcttcacctcgctcactctgtagaaggcgaaagaaaaaaaaattatgaaattttcaacatgaaatagagtgcatgttattatttcagtttcaatcttcgatcattatttgatcttattgcacaagcttatttagaatgactactattcataatcgtgacctaggtatctcagaaaaacactctttttctattaaaaataaaggtattaaattcgatactgaagatgacattaaaccttatatagaagaattatcaaaattagaaaatattgctaaaattgatatttcaggtaatactatatcacctgaatgttctaaattattagcacaaacttttttaaaatttaaagatactttaagagatgttaatttacaagatatttatacttcaagggatagatttgaaattccaaaatctttaggtgaatttttcccaattttattacaattaccaaatttatctgtacttaatttatctgataatgcatttggtcaagatgcgattgatgttttagaagattttatctctaaatctaaaactattgaatattttattatgtcaaataatggtttaggtccgttctctggtgctagagttggtaaagctttatataaaagtgcaaaattaagagaaaatgattcagaaaattcaaaacctttaaaagctttttggtgtggtagaaatagattagaaaatggttcatgtgaagctttatcaattggttttaaggcaaataaatcattagaagaaattcaaactttatcaaaatggtattagaccaattggtattgcaaaattaattaattttggtttaagttcattaaaaaatttaaaaattttagatttacaagataatacttttacattacctggttcttatgcattagctgaaaatattaaaaattggcctgaattaattgaattaaatattaatgattgtttattgaaatcaaaaggttgtaaaattttccttgataaattatcacaaatttcagatatttcaaaattagaaattataagattacaatataatgaattagaatctgattctttagaattaatctctaaattcttatcaaatttaaatcaaataaccgctttagaattaaatggtaatagatttgaagaagattctgaatttgttgaaaaaattaatgaaacttttgaagaattaggtcatggtattttagatgatttagatgatttagaagaacctgattctgatgaagaagaagatgatgatgatgatagtgaagatgaagaagcagaggaagaatcaaatgacgaaattaatgaaagattaactcaattagaaaaagaattatctgaaactcacatataatataataaaatttataaatattaatcttttatatagcaaaaattgataaaaaaattaacaaaatagtcaacaaaacaatcgataaatttaaacttatgcctcatcttctttaatgcttaataatacactattttccttaagtatttttttttccaattttgtaattaacttatcctttttgatccatctattttcaagatatttttcaagtttattcctctttaatggaactctacttaaaaatttacctgaaacatgaactaaaatgactgtttcaatattaaaatctcttaatcctaaaacatttaataaagtaggtggattaaaatcaattatctctccagttgatttattacgattgtaataaattattgttgtatcatagagtcttgtaaaatttgttttatataatccaccaacagcatttgagaaccctccaaatcttggatataaaacattttcaaatgttggtaaataatgcttttcacctaatatattttgcatttttaaatctttttcactgaaaatattaacctctgggaacattgttagccattttgtattattattatttggagaatcaagaaacttgatgaaaaattgaaactaatgtttcaccatctaattcccaattttcatcagcttgtgatatatgtttaaaataattaattgttggaatcccccatatttcaaaccatgtaaaaaattgaacttttggtattaacattgtagttaaatcttttgcaaacatactttcttcattatttaataacttaaatttgatcttactaccttttttaacttccttttttatcattttagccttatttttggccttaacttcagcttcatcatcctctgagtctgatgaaaaaactgaattaattggcttttccttaagtgttttacgtgtcaaaaaggggaaaactatatgatccacgattgatctgtgattactgataatcaatgcattttcattttcaacttcatctccaacaatgtttattttaacattatttaattcctaaatcaaaaatttagcagttagtaaatcttatcaatgtttcaaaaaaaagattgtaaaatgtatagcaaaattaggatattatcataccagaaaatagatacaaattgtccaaaaaccagattcaaaataagtttcaaagaatgctcttgttgaaggcattgagatcttcattccatacaagacaattgttgaaacattatagaaaatccagtaatttagtataaaaagcaaaaagcagaaggctctggttattttaattatgttaagtaatgaaggggactctaatatctgtatcaattcattcttacctaaatggttgagtatctctcctctcaatgacattgtctacgatatcttattggttacttatgatacactttctcttataaagaagtgttgagacattaagaatataccaggtgaaaaaaaacggaagggcaatcctattattgagtaatattataaaaaaattcttgctatctatactctcttatcttatctaatttagctgctacatctcttctactcagggttattccaattaagaataaccttacctttagctgtacaggtggcaactttttcaaatgcttcattaaaatccttgtatgcattatatgatgaatcaatgacaatatctagtttattttctttccataatttttcaattgcagctccgtattcttcatctctttcagtccaggttgcaacaattggataatctgagaaacctagttgatatttccatttattatataaatatctccaacttggaatcatattatataaatgaatgtttttataatctaaagtataggaacctgtaatttgagtgaaaataccaccatctttacccttttgtaataaatttgggaaattactgataactgattcatctctaacacaatcaacaattatatcaaaaaatccatggattttaacaaattctaataatgcctctaattttgaaacttcagattttgtataatcaattgttaaatctgcacctgccttagttgtcttaaatgaagatttagatgaacaagttgcaacaacatttttagcattaaaataatatttagcaaattgaactgtgaaaaatccaacactcgtacctgcacctaaaactaaaacatttttaccatagagattaccattatattttcttaaactttcaaatgctgtatttgagacacaagctaatgaacctgcttcttcaaatggcatcccatctgggattttttcacaaacaaaagctttctttggttcaaaaataattgaatcatgagaatgaacctcttttattaagtgataaacaatcaccataaattttatcaccttccttataacctgattctgaacctgccttgacaacaatacctgcaaaatcaccacctggaatcttaaactttggaccaaaataattgttactaaaatttttcaaaatacaatcaactggattaactgaagttgtcataactttaactaatacttcggttggtgtaacaattgattccttattagcaattggaatatagagagttttcaatgcgaatggagtagcataattttggtaagtaatcgctctaactttaatactttcctgggtaggagtttcaagtacaagtagttttgacatttttcagagtaagttgtttgttgtaaatatgaaatacataaacattatgataggatgcttgaagtgatgatgagctttaattatatatatagggagctaaattaattttttaggctcagttccgcttttctctattattattgtttaggtaaaaaaattttagaaaaaaataaatttttcatttttcagtttaatctcttttaaggagtccattaacaagtatgtctcgtgtcattgttaaagggttaccaagttattatactgaagcgaaattgagagatcattttgcaaccaaggggaatgttacagatgttaaattaaagaagaaaaatagtggtgaatcaagacgatttgcatttattggttttaaagatattaatgatgcagagaatgcagttaaatttttcaatggttcatttattgatactgctaaaatatccgttgaattagcaaaatcttttagtgatccaaatgtgccagtctcatggaaggataaaaggaaacaaagagaagaacttttagctagaactgaggaacgtttacaaaatatggaaagagctgccaattcaagaaagaataaaaaacaaaagagagaagataatctaacttctaaaattgaaggtaataaacaattaaaagagtttgtggaagcaatgaagcctgctaatcaatccaaatcttgggctaatgatgaagttgtcaatactgatggtgctccaacaaatgataaacttgaagaagcattaggaataaagccttcatctggtaatgcagcagcaaaggttaataaacctgaagttgtagcttataaaggagatgccagtgatgatgaatatgatgattttggtgtaaataataaagacgataatgacgacgatgatgatggagaagttatggtacctttctcttcaactacggatgcagatggtgatgaaaaaatgatgtcattagatgatcttgaaaagaaaaatgaagatgctgataataataatgatgatgaaagtaacgttaatgaaaatattgacgatcttcaatggcttaagagtaaaagaaagagaattattgattctaaagatggtgaagaaacagaagacgcaaaatctacagctactgaatctcaaggtgaaaaacaagaacaaaatgaagtaaatgaacaagaagacaatgtagaagaggaagctaaagaagaacaaagacaactcacaatagaagaaaaacatattgataaaatagtgataacaggtagattattcttgcgtaatattctttattcctcaactgaagatgatttcagaaaaatttttgaaaaatatggtacattaaaggaagtacatgtagcagttgattcaagaactggtaaatccaagggttttgcatatattcaatttgaaaatccaaaggatgcagtaaaagcatatattcaattagataaacaaattttccaaggtagattattacatattttaccagcagatgtcaaaaaagaacataaattggatgaatttgaattaaaaaatatgtcattaaagaaacaacgtttaatgaaaaagaaatatgatgcctcaaagcaagaatttagttggaattcactgtatatgaattctgatgcagttttagagagtgttgcatcacaattgggtattagtaaaaatgaattaattgatccaacaaattcaagttcagcagttaaacatgcattagcagaagctcatgttattggtgatgtacgttcatattttgagaaaaaaggtgttgatcttacaagattcagtgaaagagtaagagatgataaaattatcttaattaaaaatttccaatatggtacaacaagagaagaaattggtgaattatttggaacttatggtataattgagagattactaatgccacctgctggaacaattgcaattattgaattcagagatgctgcagctgcaagagctgcatttactaaattatcatttaagagattaggtaaatctattttatatcttgaaaaaggtccaaaagatttattcacacaacctgctgatgtaagtgattcaatcaatccagaaaccacacaaaaggccaaggaagttaaatcaactgctaatgatatattaaacgaaaaagatactaagaaagaaagtaatgatagtaatgatgatgatagtgatgatgatgatattgaatcaggtccaactacatctatctttattaagaatttgaatttcaaaactaccaatactgcattaagtgatatcttcaaatcatatccgggattcctattaaccgttataaaaactaaggcagataccaaagatccaagtaagagtttaagtatgggttttggttttgcggaattcaaaacaaaagaacaagccaatgcagcattaagagcattagatggttatactttagatgggcataaattacaattgaagatttctaatagagttggtaataaagatgatgaaaaaagtaataaaaagagtaggaaatccaagagtggtaaaattattgttaagaatttaccattcgaagctacgcgtaaggatgtatttgaattatttaattcatttggttcattaaaatctgttagagttccaaagaaatttgataaatcagctagaggttttgcctttgttgaattttctacatcaaaggaggctaatagtgctatggaccaattacaaggtgttcatttacttggacgtagattagttttagattatgcagaaactgaaagtgaagatgttgaagctgaaatcgagaaaatgacaaagaaaactagaactcaagctagaactagagaaatggcagatttaagagaaggtaattcaggtaaaaggaaattagatcttgaaggtgatgaagaagaattttaatttaattatgaaaattatttttcagtaaaattcaatagctctcattatatacaatctataattcaatataatatatattacatatatatatatatatatatatatttaaataacagaatataatcatttatctgacttatgtaaaccctccttaactataaaataatcaccttcgtgtaattttgataatgataatggattccaagaatcttcaatctcaccctttgataattgtggttttaaattttttatttcttcgtttaatgaattatatgtgtagtcaggtatatgtttatcatctactaatcttgtaataaaatcagaattattttctggatttcctacttcaatctttttcaattttgcaatgaagttaagttgatctgataatgatttttgatataatgatttatcctctattaatgattttttagtaaagcctgaaagattaacaagtttttcaagcatttcatcggtaacttcaatactttctttctctaaaagactttgagttgaccaagtggtggatttgaagaattcatgaagttgttcaggggattcaatttttcctcctattcttatactagaattaaatcttttactagttgatagaaaacatttcttgcaacttatccttagcattatgttggttatatatgatgatatgcttggaagttaacactgtatataacaaaagaacttcctagcattaatcaacgaacttccccaattgatgaaggtcaaaaataaaataaggtaattattacgtaatggcgttgcatgttgagccccctgatgtttataataagagatcattatgccttttgtatagatcaaccttacaacttatctctcctatatttgagctcaatgcttgatcaagcccgtcttcttgagggttgtaaaaagtggatcaatttctttgctgaaaaattacctgatgagttatgcttcttcaagccggaagagttaagggagcaagaaattttagaaactggtattggtaatgtaatttctagtttttgtagaaaagaagagataacaattgatgaattgctaagaaaaaagttatctaggcatctttataaaggacttgccaaaagattggccgaaaagggagctgttacatatttacaacatttatcaacaaataaagcagaggaagaagctatgagaataaatcctaacttaataacgaatatttacttattatcattattttatacaagtggatcaatatcaaaagctcttttagtacttcttgaattagaactcaatttaagaaaagcttcaaaagtgtgtaggaatagaatgtatgatgaaatggagaaaccattccgtagtaaagtatctagaattatgataattttttttgataaagcaaatgatacaataattactttcaaacaaaagataaaaaaaattatgaacttagtaattagaatgtacagtataaaaatgaagaaagatcgtggagtacttatggcagtgcatttttgtaagatgagtgaatttttccctactgctgataacaaggtgttaaaagaggcactaagatcagttgtaaatattatctttgagcatttggcagctgagaacccgccattatcagaaaatatcaggtacaaaagacgtaatttgaaagaagtagaatttgagagttcatcagaggacgaagaagaagaagaagaagataaactttagggggctcaacactgtacactatatacactataatacacttacactataaatacacccaaacagacgcatagacgccatatgatagatagtgaaaatttcttcagaaaaaaaaatttttttattttattctacttgatttacgttactttatttttttttcacttgtttgtagaagataaaaaattttatttaatatagtatttcctattatttcttatctgtaactaatcttaagcatcaaatatgggtccaattaagaaaaagggtgaaagtggtaatgcaaagaatttcattaccagaactaaagcaattagaaaattacaagtttcacttgcagatttccgtagattatgtattttcaaaggtatttatccaagagaaccaagaaataagaagaaagcaaataagggatcaactgcacctgtaacattctattatactaaagatattcaatatttaatgcatgaaccaatcttacaaaaatttagagaacataaaactttttcaaaaaaattaacaaaagctttaggtaagggtgaaattggtagtgcaaaaagattagaagagaatagaccaaaatataaattagatcgtgttattaaggaaagatatccaagtttcttagacgctttaagagatattgatgatgcattaaatatgatgtttttatttgcaaatatgcctgcaactacaggtgttggggcaaaaattacgaatcaagcaaataaattaatcaatcaatggttagcatatgttgcaagagaaagatcattaaaaaaagtttttgtttcaatcaaaggtgtttattattctgctactattaaaggacaagaaataagatggttagttccattcaaatatactcaaaatataccatctgatattgattttaaaattatgcatacattccttgaattctattcaactttattaaattttgttttattcaaattatatactgatgcagaattaacgtatcctccaaagattaatgaaaatagaatgaaaggtattggtggtttatcagtttatgttttagaaacaaatgaacaaagatcattagcattaccagaaggtgaaaataatgataatgaagatgaagttaaggaaactaagatttcaaatgaagaaatattaaaagctattgaagctgataaagttgaaggaagtgaaaataatgatgaagatgataatgaagatgatgaagcaattattgaaaatgttgaaaatactgaattagatgaatttaaagataacagtaagaatgctggtgatattttagaacaaccatctaaatatgctaataaagtttctgaattattcagtaaatttacattcttcattggtagagaagtgcctgttgatattttagagtttgtaattttaagtgcaggcggtaaagtaattagtgaagcagcaatagatgaacttgaaaattctaaagatattgatttaagttcagttacacaccaaattgttgatagaccaaagattttaaagaaagttcaaggtagaacatatatacaaccacaatgggtatttgattgtattaataaaagtgaattattaaatgtttcagattatgcaccaggggagacattaccaccacatttatcaccatggggagatgctggtacatatgatccagaagcaccattggaagaaaatgacgatgatgaagatgatgaagaggatgatgaagaagttgaagctgatgaggaagataaggaagataatgatgaagaggatgaagatgaagatgaagaagttaagagacaaaaggaattagaaatggaagccgcaggtgttaaattttcagcagttgataatggaaagaagaattccaagagaaagcattctgaagttagtgaagaaactgatgaaaagaagttaaagatgattatgatgtcaaataaacaacgtaaattatacaaaaagatgcaatatggaattgacaaacaagatgaacgtaaagctcaattagagaagaaacgtaaacttcttgcaaagaagaaacaagaactctctcgtgtataaaatagtataaaatagatataagataaaagtaaaataaacgtaaaataaaagtaaactttagctaataacactaaaataaggccaagactggaaattagtagtgagagaagcattttcacaaaattagtgcgattttttttaattagccactatttatctcaattattagtttgaattggttattgttcttttgattgtttcaattcttagtcttttctctatctcaaatggacaacttcatgttgatgcagtcaagctgtgactgaccccattgtccctaattattcctcaggatttatataatgaacaatcggcacctcctcatccagcagtaccaatggaaatgttaacattaattccactgtagataataataataataataataatatttctttaagacaaagagttttaaataatcattacaaacattcctattaatgctagtctatcattagatcccttggatacttcaagagatattaagggaggttcaaatattcaaactaatttgcaagatatttattttaaccctgatgataataatttagatgttatgaatcataataattataatcatgataatggtcaatggaaatctaatcaatctagttatcaaaatcaacaacaaatgcaaatgcaattacaacttcaacttcaagctcaccaacaacaacaatccgaacatcaacaacagcaacattatactcaacaacaacaacatatatctcaatctcaacaaaatcaacgtattcaatcccaacaacaacatcttcagcaaccacattcatctcagcagcagtatcatcaacagcaattacaccaagcagcaattacatcaacgcagcagcagcagcaacgtctacaagcacaacaaaaactacaacaacaccatcaaccatatcaccatcaacaacaagcaacaatacttaccacaacaacaacaacatcctcttcatgagaatcgtaccaatgaacaatgttcaacataatgtagtaatagacaatcgtcctccttgttgtttcaaatgacgttagcaaaacgcctgttcctgttgatagtactctaaatataaataataagattattaatcctcatagtctacataaacaacctgatattcctgattcaaatttgaaaaagagaaagttatctatctctatatctcctggacattcattatcaaatgttgagattactccatctaatgatttagaattagatttatcatctaacaataaaaattatcgaaacgataattataatcatcagtatcaacaagatcgtcctcaacctcaggcacaatctcaatctcaatctcagtcgcaacagcaacagcaacctcgctctcaacctcaactatctcaaactgtacaacaacagcaaaattttcagcaaccaatacaatatgcacaaccatctcaacaatcacctcagcaactgtcacagcaaccacttaaacaacaacaacaaaataaacctcctccacatcaacaaccacctccacgtccacatcaatctactaatagatctcagctcaaacaacaacaacctacagtcttttctagtcattcatcacaagtaactacaccttatgattcattaaatccaacgccaacacaattaaattttaatttgaataataatacacagccaacatctgtcaatacacaaaatccttataaacacacaaaccaaaaattcaccatttgaaaaaataatgatatagtaataataataataataataataataatataataataataataattcctcatatcagaattccaaaacatcctcaaatggatattcaactgttaataatgctccgatgagtgaagaagttagaagaagtctgtcaaatattgcaattgttagatttttaagatatagtgatttattaacatgtaaacacgaaaaaccaaatttaccatatttaaaacagttggttgcagatttcttcactgaaggttctcacataagtttttcatttaaattatcaaatgagattaaatcatataaaatatcatattgtttaattcccctgatttatttgaaatatttagaaaatgttcaaatgtttgaatttacacaaaaatttttatcagctaatgttttacctgatttttcaacaattgttgaaactgatcatttctctaaaaagtgtgtctttgaagatggttcatattgtaatcattttggttcattgaaagtgttcatggataaatcattaaaatttgaaaaatttgaaattataacagattataatgtaacaggtattgaatttacgagtttagaaaaatttttaaatgatttttcctatgagaacaaaataagtccaaatagtttccaaattaaatctcatttcagatgtatttcaagattaacaagatttggtattactgaagatttattaagattattacaagttagtgatgtaatgacattatctaaaccattactgaatttttatatgaatttagaattccaattcattttcagaatcactggaattatttaataaaattaactatccgatttatgaaaaactaaaatcaaatattaatagtttagttaatattaacggtaatattaataatggcagaaatttacaatcatcaaagcagcaacaacaacagcaacaacagcaacagcaacaacagcaacaacagcaacaacagattgatcaacaaaggtatcagcaatattctccatatcctggaaaagtgccattcatcattaccagtacatgttcaaatgatttcacaagatccgcaacatatgaatgaaacacatggtattgatgaaaggtataatgttgatccaaatatgataagacaaggatacctgggtaagaataatataattagtcaagttgtaactaagactgcaaataagaatttcaaactacagacaccaccacctaaaattattaagaaaaggaaagttaatgagaaaaaatcttgaattataatattactatcaatattaatataactagggatattttttcaaattattctatatagaaaccaataacaatttcgttgtttatgtatacttatttttcaaacagattatttactctcatccgatgtataactaatcaaatttgtataacattttgagtgttcttaaataactataatagattgaaccatttttgagttgaaaaaaccaaataagccaattttactgacgtcaaactctagatagtgttggtagattttcaaaattaactgaaagactaccaatgtaagattttttaataacaaaatgacttgaaataaaaatactttatttagaaggtatattataacttattgaaaagcccaattgtaaaaaacagagacagaccttcaattttaggttgaaaaaccacatacactaccagtaatgcttaaaagaaattgaaagaaaaaaaatttaaaaatcactaattaacggcaaaaatgaccatgaacatttgtagaatatatgcctctttagcttagtggtagagcgttgcacttgtaatgcagaggtcgctagttcaattctggcaagtggcatttattttttcatttttttaagatttttttgactactaagttaaaggaaaaatattttttttttcaacctctatatcacaggccattaaagatttagttatattgaaattgaaatactaagtatcgttttatcattaatacaaagataagaatggaggtagaagggtgtcaataaattacttggtaatcttaatgaacttgtgaattcaatcaccgaatcaataaaggataatttaagttgataaaacattgattgaatcacttgaagaaatttctaaaattggagagattgaacataccgaaacattaagtgaacttgaacaagcaaaattattaaacatttattcatatatacttgtaagtttatattttacaagtctgaaactttgtggtgataaaataaataatgaatcaccaataatgtttgaaattaaacgtgtgaaagaatatatggataaagttaaacttgcagaagatcaatttttgaaaaaagagactaaagaacaaaggaaagaaagagagagtgaaaattttattaagaaacatataggcgtaacgggtaatgaaccagcagtttcgaagacacattttggtagtcatgtacgattcaataatgaagaagaaaagttaattgttgatgcaaagaatagtaaagactcaagtaaaaagaaacttaaaaataataataatagcaagttatcttctgataagatagatgattcaaatagtaaaatccataagaataagaataaaaataaaagtaagaataagaataagaaatgattattgtgtaaattaatatagaacaaaagatcaattttacgttagtaatagtttctacttatcttgatgtagattttagattgtagataaagacattggcatgtagccattacatgctaacgcatatgtgtagtcgtaaaggctataattacatgataattatgaaaaggtcgttaagtcgcatgaaaccccccccccacagaacaatattttttatgataaggatattgtgatcaataatggtaatatatattgtggattcaattttgtgattacttcttctttttaacaagcatgtttaagtacgttagagatatatatacccgtcataagaaaaagttcttaattacatcaggagttgcagttgtatcttatttaattggtatttatattaagaataaaataaaggattttcaagatcaattaaaagaggagaatgcaactcgtgaattaattaagaaaagattttctcaaactcaaaaagattgttatatgacatttttatcattcttaccagttcttattgacccaatttataaagaattgaatgttgaagatataactaaagaactaaaacttattagaaataagagaaacttatctgataatagaagtgataataatagtacagacttgggaagtgcggttacaacatctgaaacttctaatgacttccatctaataaatgatgttaatagtagtagtaccgacactaatactaaaagtaatattaaaagtaaagttgaattatggaaagaacttaaaacaaaatcattaaccagatttttaacattagtttatagtgaaacattattgatattattattacatttacaattaaatattatatcaagaaaatcatatttaaagacagcaattaaactagcatccagaaatcaaggaattcaattaattgatttagatgaagaaaaggaaaatgatggaaataatgaaaaagatttaccagaacaggcatttttatcatttacatggtggttattaaataagggatgggccaatttgaataaaacaataacggaaagtgttgaagttgttttcaacgaagttaatttgagagaggaattaacaatggagaaatttagtaatttaattgttgaagttcaaaaatctattgatattaaattatttcaaactaaatatgaatatgaattatatgaaaatgtaaatgaaaaggagaatgaaaataaacaaacattattaataacttcattattattaccatcaagtaatgatgaatttgaattacttaaaagaacaaatacagttgaatttttagcaagttttaatagtaatattactaatatggaaacattacagagaatgaatagtgaactaaagggatatttggatagtgaaatgataagtaatgttacgagaaatattgttagctcaggtatatcatcaattttagatagtttatatcattcattgatgaataagagaagtttaaaggaacaagatagtaatgaaccaaatagttggaaacttgcatttattctagcagttttaacaccacaaacacaagaattaataaatcgtcgtattgataatcctgtattacaggcaatgaacaatgttccaggattagatgaattaagtgccagtgtttactctaattttgaattataatttgtataaataagcagtataataatatttcagattcagatcatccgaatgaataggaggtcttatcggtatatcagagtgaaaaatttagaaaaaatcattctcgtatacaatttccccttgtggcgtgtttaacagtgatgaagaatctgatatcgtatatttattttacttttaaggttcaacctcttttcttttgcttcattttgtccttgggttttgatcagtataaacaatggatgttttagatctatcagtgcttatagcaattttaattgctcttattgcttatactactaaggataaactttggggtggtaataataaatcttcgaattacgattcctcatcaggtccaaaaactacttcaaatgatttggttgaaattatgaaaaattcaaataagagagctgtagtcttttatggttctcaaactggtacagctgaggattattctttgaaattttcaaaagaatttcaatcaaaattcaatgtgccaacaatgacagcagatttagctgatgtttcatttgaaaattttcaaaatattaataatgaaataccagattttgaaattgccgctttctttatggcaacttatggtgaaggtgaaccaaccgataatgcagttgaattttttgattatttagcaaatgaatgtgatgatttatcaggtattaaatttgtttgttttggtttaggtaattcaacttatgaattttataatgcaattggtcaaaaaactgttgatgaattaaaggaaaaaggcgcaattttaattggggaattaggattaggtgatgatggtactggtacaatggatgaagattatctggcttggaaggaaactttatttgatacaattaaagatactttaaagttaaaggaacaagcagttaagtatcaaccagctattgaagtttcagaaaaacttgaaatggataaatcagatttaactgtttcattaggtgaaccaaataaacattatgttaatgcaaaatctgatgatgaattaaatttcttaaaatatggaccatttgatcatactcatccttatttagcaccagttcaaaatactaaagaattattcaattcaaattcaagacattgtattcatgcagaatttgatttatcaaatacaaatttgaaatattcaactggtgatcatattgcaatttggccatcaaattcaaatgaaaaagttgataaattattaaatattttagatttaataaataaaagggatacagttattgatttaaaatcattagattcaacattacatttaccattcccaactccaacaacttatgatactgttttaagacattatttagaaatttcaggtccagtttcaagacaatttatacaatccatttcacaattttgtccaaatgaggaaactaaaattgaagttgaaaaaattgcaggtcataaagaaaactttcataatagtattacaacaaaatattttgatattgcagattgtttaagttatttaagtaaaaatgttaaatggaattcagttccgttttcattcataattgaatcaattgctaaattacaacctcgttattattcaatttcttcagcttcaggaatggaaaagcaaacaattcatataactgcagttgttgaacaagaaaaaattaaggatccatcagataaatttattacaggtgtaacaacaaatttgttattaaatattaaacaaaaacaaaataaagatggtgatttgaaacttattgaaacatatgatttagagggtccaagaaatatgtttcataataaacttccaattcatattagaagatcaacattcaaattaccatcaaatccttcaactccaattataatggttggtccaggtaccggtgctgcaccatttagaggtttcattagagaaaaagttaaacaagttgaaaatggtaataaaaatgttggtgaaattttattcttttatggatgtagaaaatctgatgaagatttcctatataaggatgaatggactgaatattctaaaaaattagattcaaaattcaaaatgattactgcattttcaagggaaactgaaaagaaagtatacgttcaagataaattattagaaaattcctcaaaagttatagaattaattaataaaggtgcattcttctatgtttgtggtgatgctgcaaatatggcaaagagtgttcaaaaaactttaatacaaattttcaaagatgaaaagaaagttactgaagaaatcgcatcaaacatggttaaacaattaagagttaataatagatatcaagaagatgtgtggtgattattgtataatctacataaatataacttttaatagtttgtaaatgaaattaattagtaaaaatttatagtaagctggagatttcattattccgcaatatctgtgttagcaatggactaaaatttttttttcatcaaaatttttttaaagtgaaatgtttattgagataacagtttttgatcatattcttttaaatttttaacaagtaaaggcttcaaataatcaaagaaatgggggttgttgattcacagacattaaagacaattaaaaacaaacagaaaagacagcaattatttgcacaattaaaacatgaacataatacaactcgtcataaggaatgtcaagcaagagctcgtgaagaacgtgacaatcctgaattaaaggagaaaagacttgcagagaatattccagatacaattgattccaaaagagtttatgatgaaaccgttaatgttgatatggaaggtgaagataattttgatagttattttaaagatggtcaagaaccaaaagttttgattacaacaaatgcaaatgcaaagagacctgcatatgaattttctgcaatgatgtgtgaaattttaccaaattcaacatttgttaaaaggcaaagaaaatatacaataaaggatatggcagaatattgttcaaatcgagattttactgatttaattgttataaatgaagataaaaaagttgttaatggtataacatttgtacacttacctgagggacccacattttattttagtataacttcattagttgaaagaaagaaaattacaggtcatggacaaccaacaggtcatgttcctgaacttgttttaaataactttacaactagattaggtcaatcagtttcaagattatttcaatcattattcccacacaaacctgaatttgaaggtagacaagttgttacattacataaccaaagagattatattttctttagaatgcatcgttatattttcagaaatgaagaaaaagttggattacaagaacttggacctcaatttacattaaaattaagaagaattcaaaaaggtattagacaagatattgattgggaatacaaaccagaattggaaaaggacaagagaaagttctatttataagattttatttaaatgtttttataattttatattcttataagtaatagaaatatttatataaaatacatagagataagttgtataatatcaatcaaacgggtggtttattttctatactttcaaatagatgtctagcaattttaatatcttcaagtattaaactttcatttctaacttcataattttcatctttaccaatattattatccataataaccattatataaatatttgaagttaaaacatctaaatatattgatgtatccttaccatgtaaaattaaaagtttaaaattagatcttattttattgacactttgtttataagtcttaattatatttgaaattttttcaaatcgtttaggatctaagttttcagttgatgataaattttcaatcccggttagtgatgatgttgatgcactacctatattactcttcaatctatccattgatgatataactaaaaacgtagttttctcaaatagtattatttctttggcatttaatattttatttaatttagctaaatgttgttcatatattgaaacatttggtataagtgaacaaacaattgatgaccatgctttatataaactttcatcccaaattgaagttgcaaaacctgttatatcaaaaccatattcatttaatgctatatttttcaaattattatacataagttggaatagttcttgtcttttatttgattgaactaaatcaattttatgaattaatatgaagattttaacttttggagaatatttacttaaattttctaaaactcttttaaaagtattgatatcttttgcaacctctttactttcaacatcgaaaacatgaattaaaacttcacattttttgaaaatattatttgtgaaacctgaattattattattattattactttcattaccacctgcaccattcaaaaaattatccataaagacatcttgtccaccacaatcccataaattaagtgtcatattatttaaaaatcttaaatttgaatgttcaacatcaattgttgcacctaatcttctcgtatcgaatgccgaataattggagaaaataattgatctcattgaagatttaccagagcctgaacgacccataagcaaaagctttttccctgtagacatgatttatatagatagtgtcctgtaaaatggttttactactctataaggaatgcatattggcaaccattgcttaaaacaacagtgtgattatcaatgtgaaaagacatgttcgcttcaattgcctctttgggacacataacatagttttggataacccgttactgagtttaactaactattatactttcagatcagttttacgtttatacgtttttttttaatttgcattgatattcgttctttgcttctttcatgaattcacaaacatgtttagtgataagagagagttggtattaccggaaaagtttttcttttggagaacaaaacttggatttttttcaggttttagagttttatctgaacattccattaagttaacacctgctttagtttatcatgcagtttcacttttatgttataaatatagtgttttcgttactgatgtttttccaattgaaaatacagagtttggttatggtttaggtttagtggatgaagttaaatttagtgatgttgttgaatttatcaatgatgaaactcttacaccaaataaaattctagataattacattaatacaaagtttaaatattctaacaataaaccattatggaaattaactattattaatgaaaaatacgctttatttttttgtgatcatgtattatttgatggtacttcaggtaaaaatttccatactgagtttgctaaaattataggtcaaggaattccaccaattgcagcacaattttttaaaggtttagattcagttgtatttcaaaaatttgaaattgatccaaaggaatattcagttcttccaagtcctaccgatttaattaaatatgaaggtacaagattgagtcttatctatagacttatattagcattagcaccaaaatcaatttctaattggattaaatatttatttgatggccataaatatgctaaaattttaagctatgatacattaagctatagagaatgtgcactcatcccagaaaaggcaagtagttcaagaattgttcatttaaataaggataaattagattcattattaaaagtttgtaaatcaaatgatgttaaattaacagcattattaataactatttcacatattagtttaggaaaatttattggtgaacaaggtagggattctaatatagttattccagttgatattcgatttttgattgatgaaaaaaaggcgtatactttgaatccaaatttcacatcaacttttggtaattatgttggtagtgttaatgttcaatttaccatcatcaaagaaaattgtataaatgataaaattaattgggaaactgttaaatttgttaatgaaacaattcatgaaggattaccaaatgctgcaacagcatgggaattattaaaatttactgatattaaacaatatgtttttgaaagatatagtgattataatcaatgtacatttgaaatttctaatattggtaaaatttcagataatataccaagtattaagcatgcatggtttgatcaaaagagtcaaatatttgcaatgaattcaattagtacaaaggaaggatgtaatttagttttaagatgttgtaatgaagaatggattgatggatttgcttcaaagattgaaaatattattgatgaattaattaattaagtgtatagagtttttttattgtatattatggtatttttctctcactaatatattgcaagttatttttttcaagtaggttattgttgagccaccttctttatgagtgaaaaaattaatttgtcaacatcttctttccttctcttttaagaaattgggtataataacgtatgtgtgggatattgtttcactacagtgaaggatcaagtaataactacgatgattatggtgaggatacgctattcaaatcactcatcccaataattcgtgaaagaggtggtgattatgaacgttcaacacatgttgatgatataaaattatattcaagtgtactttcattacgtcaaccactggtaaaacaacctttaattgacgaacgttttgttattcaatttaatggtgaattatataatgatgaaatatcagaaaatatgaatgatgttgaatttttacatcatttattaataaaaaatgaaggaaatgttcataaaactattggatcattaaaaggtgaatttgcctttacaatctatgatacattagaatcaatattttattttggtaaagatgcttttggtagaaaatctttatgcttttctgatgatgaaatgggtgatgtatatataagtagttgtttcccaaccaataaatcaaaaagaacaaaatttaaagaatgtgaaaaaggaatggtttattattatgatatagtgagtagagttttaggatgggattcattcaatgaatctgatgacttaccaaattttttaaatgttctaaatgattataatagagagatcacttataatcaagatgaaataattactgaactacatgaaaaattattaaaagctgtaaaaagaagaatttcaacaattttcccattggagaaagataaaacagatagtaagtttgcagtccttttcagtggtggaatagattgtacattaatttgtggattatgtggagaattatgtgaacaaaatacaacgatcgatttacttaatgtttcatttagtaatccacgtgcaaatttaagttatgatgaaactcctgatcgaatgttagcaataaaaaattgtaatgaattgaatcaagtttataataaaaaaggagttcattttaatctgattaaagtgaatgtaccatatgatgaatacttaaaagcaaaacaacgtgttatagatttaatttatccaaatgatacagaaatggatttatcaattgcaattgcattttattttgcaacaagtggtaaaaactctgaaggtaaagatagtaattgtaaagtattattaagtggacttggagctgatgaaatttttggaggttatacacgtcatgaaagaatttttactggtataagtaatcaaattcgtcgtaaattacaaggtaaaccagttaaggatgaaactatttatgatattaatgaattacaaaaagaattaagagatgaattacaagttgatattgatagattatgggaacgtaatttaatgagagatgataaagttatttcatgttggaataaggaagcaagatatccattcttagatgaagaattgaatgaatggtgtacaagtatgggtaaaattccattaactatgaagctaaattttaatgaagaaacaggtgaaattacacgtaaatttgcacttagagaattagctaaatatatgaaacttgattttgtctcacaggaagctaagagagctattcaatttggtagtaagagtgctaaaatggatgtaggatcaggtaaagtcaagggcactgataagttataaaagttgaaataaaaagatcggacataaacaaacacgaaagtgaaaatttgtaaacatcggagtttgagatcataacaataacagcaatattaaattaataatatggggcacccaccacgtttttgaaataccttctctgttttatcttttttattatttaatagacacaagtaataaaaagataaatagagtattgggtcgtaaataaaacttacttgaaattattccttctttgccgtctttgtttattattagatgattacttagattgaataatttaaatttataaattataacatgtacatttcataaatacgaattaaataaccgtaaataatgcgtttggttggcagtatctgattcattacctgaaaatacagtacaatgctcaagagggtttacaccttttgaaaaatattatttctggaggaataaattaaacatgtactcaaatttccgtgttgctgtggaatatactgaagaacttgacattgatggaatatattatgcattaaaggaaatggttaaagaacattcaagtctttcaatgaatgcttataagaaaaaacattttataccatggcttcaatttccttattatcttaaattcatggataaatataaacttaatgatgttttgaaaattgttactgacgaatcattatcagttactaatgttttcaatgatttacaaaatgttcatttcaaatatagtacagataaacctttatggtctttaatattattgaacaagaaaactttggtttattatagtgatcatttacttttcgatggttcttccggtttgaactttcatcgtgttttttcaaagtatttcagtgaatataatgaaaagaagaaatatcttaaccacaaaatatgctcgatggatgatagaatgaataatatattatttgatattgataacgaacagcaatactttaaaccttgctccgaaaccatcagatttaattgattattcaattcctttagtttatttgctttatgtcattatgttaatatgcttccctaaatgcttgataaatcttattaaatactattttattgatgatggagatatttccaaaagtagaacttataatatgatatcattatctaaaaagatgattcaactgaataataataaagatcattgtaaattagttcatatttcacaagaaaagttacaaaccttaatatctgactgtcgtaaatacaaggtgaaattaacatcattattggttgttatgtcactattatcaatttctcaaatcactggctgatgaaaaggatacaatggttgttatacctgtaaattcaagagataaaattaaggatgaaaaagttagaaaagattttggtctttatcttggtgacttaaatttagaactaccaccagttactaaaatgtgtagaaatggtcaaattaattggagttttgttaaatatattaacgattatattcataatagttttgcaaattctcaaagagatttaggattaacaagtttggttgactactaaaatttttctcgaacagagaaagcaatgttatgataactcaatgataagtacattattagtatctaatttaggtaatttaaaagaatcacaaaaaaatcaaagagttattgaaaaacctaatgatgatgttgagttatttgaaaatgcatattttgatcaaccatgccaatctgctgttctaagtctgtttgcgatgaatgttataagtacaccaaaaggaggtgctaatttagctcttcattcagttaattcaaaatggcttgatattttcaatgaaggtgtcaatcaacaattgtctcaattttaaattcataattaacataatgtaatttctataaatgtttaatgatttactctaatatattctattctattatatatcttgaataactgtaaattctaaaatactatcgtaatcacccagtttgaaataatctttatttttcaattgtatgtatcttttcttaggtaactcaacttcagatccgtttaaaaatataccatttgttgatcccaaatcaattatataacaggtaacgctattatcagaatccttattttttctaaattgtaaagctgcatgttgtttagatactaaatcaccatcttctgtctcttcatcaattactatatctgataattccttatctctaccaaatatgaaaaatgatttaaaattgtataatggtatttctatttgttttttcagtatcttcagttatatttaaacaaatgataattacaaattttccttagtgggaataatttcatcttctggtggtgtatatatattcaatgtatctataactgttaatttttgacttgatggagctctctggaaatctgcatatttaacgagtattcctgatggtcttggatctatacgttttggtttagcaattgaggtttcatatcttgaatcatcattcctacgactagttctgtgataattcctcctgtcatctcttgatctatcatctctgtatttatcatctctgtatttatagtcacctcttttaaaatcacgacctgatctatcacgtctttcaaatctaccacccaatcgacgaggtcccttaggtatcacactatattgcttctccatatctactgaactgcttgctgtgttcttctccctgtgtctataagtaagggacagtgaataccacataaagtaagaaaacatgattgcggtcgctgggtcggacactttaatacttactttacttataactagaaaattggaaaagtgaggggattcactgttaaaggaattgaagaccttagtttgttacagtataaaagattcgtctttgtaaaatatcaagaaactactcaaatagacatgtcttatcctgtttactttaaggaacctgttagatggttacgttaccaagcacataataagccacatctttttttttcaggttttattgcattccttggaccagttttccttttcgcaggtactccattaagaagaaagtttttatatgcagatgcagctccattaccattagatggttatccaattccaaatagagctagatctccaccacaaggttatgaagattagattctcaagtattaaagttaaattaaatacaacaaataataccagaaatataatttataattataattataatacgaaatttttactttgtgtaattcaaatgattcattcaacgctttataacaacactatttattacttataagatgttttttttaaaaaaaagcaattaataaagaaaaaaactgtacagtaaatgcaattattataatatcgaaatatgatttcttttattcgaaatttatttttataaaaaagatttatctatttacatgatggttaaattataataatatagcaatataagtaactataatctaaaacaaagagaggtatatgacatatattaacttaccatctgtaaaaacctggtgcattacctctaattttaccatttgtaataaaactatttacagatttttgactatctctcttattagctaaataagctaatctattctttgtttgttttgtttttaataagaatctaacactaacccatttgaaagtaagaacaccagctctacctctacctttacaatcgactcttttaacccaactaccatcagtatgaacccaagactctgcaatatataaatcatcaacattataattcattttttctgcatctttaacacctctttctaacatttcaactaaatctctagcaactttcttttccataaaatgaagttgagtaattgctttctttaaaggtaaatcttttaaagctctaagtacaatattagtttttttaattgatgctttaattctccaagatctaagataaattgaaggttcaagagcttgaatttgatcatttgttaatttaagagtataagaattaccatcctttaatttagttaattcattatttttgaaaaatccatttttggaaacatttgctaaataaatttctctctttaatggagtcaacaaagtatttattgttaaataaggttttggattaagaaattcttgtaattttgaatcattttcaggtgaaacatattgaatagttgccgcatcattttcatcagcaactgcaactgaattattattattatttttattaagtttattcttttcatcaactgattttgttaaatcactaaacagggaatctgcaggtttagttgccaaaaatcttactttatttgaaaatgcaatagcattcctaaaggaggttaaagtattaggcaggcgtgtaaaagttagaaccattgttggatagtaaaatagaaacagtaactgaaatcctatgtaattgaaacctctaactgcaattgattgattattcaaactaattcatgttgagaaaactgagaaagaaaaaaaattaaattaaattaaattgagaaatttaaaatagccaccgacgcatcgtcgcgaggactgattggaggctcggttatctattttaaggagtgggaagataatattttattagttaaattaattaattaatttgatttatttcattttaatttaacttgctttcttttctttaaacacggtaaagttatgggtagagtctgtgttgacgcatttgatttaaaggaaactgaatcaccagttcccatgtctttatccgttacttcctctaattcaaataataataaattaatatcaaacttctataatcatactaatgattattactcagataaggaaattcataatgaaaagttaaataaaaatagaagacttagtcttagtagatcttcaatttcttcaatttattcaattgatagtaatgataatgataatgaacataattttaattatacctataattattcattaacaccacgatcttcatcaaattcccatattcatcatcgtaattcatttgattttagtactttatattcaatgaatttaagaaataaaaatgaatttttctcgaatgatattgataaggaagatgattatggaaaagagcaaaaggatcaaatcggtaataataaacccagtcaatgtgtacgttttaatattaatcattcagaaaattttaataatataacaattgatagaactgcttttactagtttattaactcaaagatttattcatgatcatattgatggaagaaattttgaacatgtaattgaagagcaagatgaagatgatgatgatgaaaaagtggatgaggatgaagatgatgaaaaggaagaagaagaagatgaagatgatgaagatgatgaagaagaagaagatgattttatggaagaagttgataatgaggaggaagaagacgacgacgacgatgaggatgagaatgatgatgcttatcatgtaatcgtagacactcataatgatgaaagtgatttacatacaaattcggattcagaaaatgataattcattggcttacagtagcagtaataaaaaatccaaaaaatcatcaaaatctaaagcatgttccatttacagatgtaaatcatgttcatcagatatttgtcattcatcattaattaattcaaaagatttttggggtaataatggtttagcttattttgttgataatgtaattaatgttagacttgatgatcaagaagttatgaaaattatgagaactggtgaatatggtattaaagcaatttattgtattcaatgtaatattaatcttggatggaaatatattacaagtgtatctgttcatgaaaggtataaagttggtaaatttgttattgaaatgaatttattagatgattacaaaattccaaaatgatttgttctttttgatttataaaatattttactatggctttctttaaggtttaggtttgggtttgggttttttttttctttttgggttttctttggttcttttaatattttgggtttttttttgtttcttttgttatttattgatgaagctataagttaagtttttttttgaatataaaatacataaataagaaaaataattttataaagagtggataacaagttaatttttaaataagtaaaatttaaaataattgtaattgtaatctgtaattattatatacagcaaacgtagagaattgaatttgtataaatgacatatgtgtttattaatgtacattttttcttggttgtggtacaggtggtggtaattttaagggatcagaaacgtcatcattatcatcaagttcattaagatcaaaattagttttcagtggtgatgctaatctttccttttcaagttcaaatttaaatgtattgacactatttgcaatataatcatatcttgttgctccactaccggatctaactctattagaactcaatatattggctcttaatgaatcatcataatcattattaatatttaattgttgcatataatgagttgattttgaatttctattagaattattattcgtattgttattgttattgaaattcaaattttcattatcaaaagttgaacgtgaaggtgaaccacttggagaattagctggtgaatataatggcgaattaaatatagaattaattggtgaatcaatcgaattgaaattttgattatttttattattattaagattaggatttagcatacctgaatcttttgcagttgaaaattcatcccagacacattgttcatttggtgattcatataaaactcccatagttctatctatgggaagtttaagattcaatggagttttaggtgaacttgcaatttcctgataattcattgtattaatactattaatactattagaatttgaatttttccttgattctggaattggtggtaaaatataattattatttttagttgatgaattaatttcactaaatgctgtatgcatatcaaataaactcatatctaaatcgtcatcattaatattattggtattgttagcattgttgatatctaatggttttaattgtttttctggcgagttaaaaatatttggtttattattcctattgattaatggaggtgtttggaatgattcacttgaatttaaatcactttgtgataaaattatcattggattttcaaaagttttgctgttaggagccattgatttctcagaataaatattatcaggactatctttatgagatccgattgtgaagttgataaaattatgtttttcccagaatggatttttcttaaataaatagtataacaataatgatacaaagccaagaccaaatacgagtgcaataactatacctgctattgaaccatgacttaatccatgattagaggataacatatcaaaatcaggtcttgatttcagtgcattaatatccgttgttattgcaggtggtgatattatatatgtagaacttaatgaatcaacatagaatgtagttgttgctaataatgatgtagttatagtagtttgagaatcagtaacgacatatacctgtgtatatgtaacatcttcaagaaattcagtaacagttttggtacttttagatgatgataaagatgaagatgaagaagatgatgacgatgaagttgttgaagttgtaatataaaatgatcttgaaggtttgagggatgttttgaaagattttattaacgaagaagttgttgttgatgatggatattcgggatcactgtatatgggtattaaagattgagaacttattcgtgaaatatatgatgaactctttccagatttttgatatgtagaattataattattatgagaatatgctgatgatatattaataggtgcatatcccgaaggaaatgaatttgttgtaattgttggaacaatcaattcaaaagtgggatgtgtatccgttgatgcagcttgtgtataaattgtaactggatcatcttgatcaatatctgttgaagtaattggtaatgtgggtggtggaaggaaatgattagttgttggagttgccagcagctccaaaatttcagtattctgcgttgatagcaggggggctgtaccaacaaacatgagcaaaaagcaaataattaatttctataaattatatgtgtatattatactactattatattatattattagtgaaaaggaaagaaaaaagtataaaagaataaagaatagaatgaaaaatcatgcataaaagctaaaaaaataaacaactaaaattacatcaaaacaacatcaccttgggagtaaattaataataaacactacgtaatgaaataaattttcaaaaatttcataatttcgttatccattgcggtgtttcaaatagggggctcaacttatcaatttcttcttgttgtggtcttacgtaagtattggcatgtctcttagtattctcaaaatcctgagactctgcttctttatcttccatctccatctctcttttgagtccaaagtgtgaaatatctctatcactcaaaggtatcacaactcctaaaagttgtttcttaattccacaatcaataaaggattcatatttagaaagactctgctctaagtaatgttccttgaacaaattaacatccttgctaccattatctccgtaattacatttacagaactctaataatcgtttaacctctcctgcaagttggatcatatcattttgtgatctctccaaaacttcattaaaagaatcacttttataatcattgtctttttctaatctgctagaaaacctaatacttaaatgcttaaatgataaaatacatattgaaaatgtaccccatccaatactttcaagtaatatcttttcaatcattgtcttcttatgtaaatattgatcaaataaatactctgctgatataacggctaaatcatacaatgatgaaccaatcattgttttgaaaatactttttctctccaacatattctcaattaaaaagttacttaaatatgttaatcttaaacatgtaatattaactatattgttattccttatttgtagttcatttttgataatattaataataaagttcattggccatgacttcaatggtacaataccataactagttttaaatatcataacacatttattaaattgcatatctgttaaagttttccaattgattgcgtcactatcccatcccttcaaatcttcaatgttttctgattcaggattgatctctttaaaaaattgaaacatttcaagatattttttaaaaataaattcaacctcaattatattttcacaatttaaacatgtaatctttttagcaaactttggtaaactatcataaattgcaaaattctctaataaaaatcctttattaagcgttccacaatatgtgcaattaattggtagcatatcatcaaactttttatccataactgtgcatttataacattcacaatcaaaaaaaaatgaggctttgagctttttccttctaatttctcttggtaaaaagactggaatataattcaaaagcatttcatttgatgctttcagctttttggtattcttaaccattatttcaccatcattcttataaactaatgtgcaattaggatcacaactatgatttatcattgaaaataatggatcaaacatcataccaagattattatttaaatgatccattactgttgaaatattaacatagactaaaaaacatgccttataaattccattttcattaattgatgacccaccactcctattactatcactaactattttttttagattggtatcaaaaaatagtttaatcaatggtacaaatgtattctttgtatcatcaaaaacttccttgtgttcaatacactcatattttcctgtttggatataattcttgtaaattttaagatgatcactcatattacaaatcatatttagtacataatcatcatttttagccaaacaaacaagtaatctgaaaattgttgtgataagtaaaactgttttctcaaagttttgatccatttcaagatcatcttttttccatccttgctttttacttctagtaatgggatcaactacaacaatctctttttgaataaatttaataaattcacattcgatattatgccaatcaagcattgctttcattttacattcttcaccacaaaattttctaaaatcgcatgtatcacatttaatttcctttgtaacaccgtcaccatctcctacaatatcacataaaaatttcccacattcagcacaattattgttaattaaaccaattactttaatcattggaacaaatttaaacatgtttgttccggcatttatagatttttccttaaaaacattgttattaaacatacaaacttttaatcctctttctttactattcttgctctctgggttcttcaatctgataaaaaaatcattttccttatttaaactatcattgttatgaaaatcattattgttgttaatgaaagaaatatgcttgcttaaattagtgctcccagtgttgagaaatttctcaaaacttacaccattaattctttcttcaataaaagtttggaaaagattaccaggaatatctggtgaattcatgcatagagttctacaaacattaataaatcttttatacagttccaagtccatatttacttgcttttacaatgtataaataagtttttaaagcataaacaaagagtacaagtaatataatgtttgaaaagggaattaaaaaaggggagaaaagcggttaaattttaagctagatgtgaatttggaatatcgtgaagaaaacttccaatttcaccgaggagtaaaagatattcatcacaccaacatgttattgaccaccaaagtgagaagtgttgagttgaatgttcgatagtaatttctcttaatacagcttggctgaatgcgccaatgtataacagtaaatcacgaggatctatatcagtaaattgatctgagatatacaggaaaatcttagagattccgttcactaacgaatctctataagcacagtttgattgcttttgattttccagagctttgacgataccttcaacattgctcaaaataagtttgattaactgatctttgacatttaatggaattaatggacaattacaaattatccttctaaaatctaaagcagcaaattcctttttgaagctattgatagttgtatagttttgactttctggattatactttttgtcttcatcaaggtataatagttttacaaaattagaggataaaaataaaaccctacccaaggatctgataatgtaaagaaatctcaaattaacattattttttttatcagagaaaataatgtttttctgttgatgaataaaattgagatattcattttcaaaagtttcaaatgcgctttgaacaaaatctggaacatattgaaatgtgactttggtaatcaactgaatggatatcctgaatgcttccaaatcacactgatgtgtaagctctaacaaaacctcattatctctttcaaaaacatctgctagatcttttggtaaaaaatctaaactattaaatgtagccatttttttaaacaatgattcaaatctaatatatctccagcaatcaacaagagaggttaacacatcacagtatatttttaagaactctttatgtttcacattatcaattttagcgaatatgcgatcaaaattaggaacaaattccgtttgatgttcaatatcgtaaaacatctgttgatcaaacactaacttatcaaaaatctcaggtttcaaaaatgttttattccggggttttttcaagtctgatggtgattccatggatgttgggtttgtttcattactgggtgagctagaagttttcaaagatgaatcagataaacccttaacatttgaatttatttctgtgtctgtattagaagcagataattcttgatcgttcaattcactcaagcttgcattagattcatcaatcaatctcattccacaataattgtatttacttgaacctctgactcccagtcgtctagttttaataccaggatgaaaaactttaactattttaccaaaagcagcattgcaaatgggtttaatattatgctttttacaaatattggagtaatttaaataaaccaaatttctttgacataatgaatctcttgaaattttaaaggatcttattaatgtaactagtgcaaataattgatgctcctttttcaatttatattcaatatttttaactatcttttgattctttgtattgatctgtgcattcgatttaagttgctctccaagattttttataggtttagctaattgagaatatgggaacttcgctctatccttggctgctgttagtagcaacaattgtgaggtcttcttatcatttttatcggtgtatttagatgtagcggctgtttccaaagttaggtcaattgaatcattgtcactgccgctatttgacacataagcttttctagcaggttcaccgccaagagattgattttgtggtgtctgtttaatgatttgattagcatcatcatcatcaaaattatccaaccagtcttgttcagcattagtggctctatcctgaaagtttaagcctattgcttccattgggactgaaaagttttgattcaaatttgcactataattcattgaaggtaaagtttcaaagggtttatagttagggaaagtcctgctttgtctagtgaatgcatatgggaatgatgaaacatttgcattatgatcgacttgaatattagaagaaattgataatatcgcttgatgataatttggatcataagttggagatctgggttgaattaattttccatcacttgaatatgttggagtttcatcacctttgtaaaaatgatactcgggtattgtttcattgttatgtttaggtgatgttggatggattgtgttaggatgtatgttattcacatttaattttaattcatctttataattaaaacttgtatcactgttttcattttgagaagcagtatatgtattagccggggtatattggttgacagcatttctagtattgttattagagttttgggcttggttgttatgatatattgttgatccctggttctggtttatttgttgtggcatcatattgttattattaaggtgattattagtcgagacaaatgtaggatccagcgtctttttcgaatatgacgatagaatattgctaggggaatagtttgccatctctaacatcaagttattatactctatattgtttctattattattattttgtgctagattctggaactgttcagggtagtttaacaatgtgtttttattttgatttttgttccttactagattgttcgatgtttcagcaaaagtagaattatttactgacattttcaaaaaaaatggcttctgaacgagaaatttataatgtttaaagggtatataagttaagtactagttgaaggtattggacatttgagctatatatgagggataggtgattaaagctagtgaagaaaatgtgaaaaatcaatcctttctactaccgttactttcttatatctaaaatagttattagttttcacttgtatatgttacggttggagtgccaagagaatcgtacagaaaagatataagatagaattagtaaatcaaaaatgtgaagcaacaataattggaattgtccgaaaaaattgtttctaaaaaaaaaccgcccattttgttatacttgttacttctgcgaatatgacaattacgtaataatctaataataagatatactaaagaatgatttctctatatctatataagaatctatataagaagaactacataactattagttattcccacatattatatcctgtgggaatttgccctcttatacatatctcatgtaacgagttgccccgttacctatattatgatattattactatcaatatatcatttacttacgtaatatatcttacgtaattatattctatatttatatcattcctgacacatttcgtccatttttttcacttgaatatattcttttaatcgatgacatgcaccttaatttgtaagataatgttatcatccctggggtagaaagagatctttgaagaaatcatcgaatgatgtgaagttttctagatcaggtaattgtgggactgtattgactatcgtattatttgttgtatctgacgataatagtggtaaatcctctcgtgaaagccttctctgctgtggtgtatcgcgtactctcaactcccggtaccggcccatacctgtatgtgatccagaaccgataaaccctttatcaattacttcggttgaataaatttgtaattctttatcttcacctgccatttcaactaattttttaacaattatagcaatcgtgttagtcaaatcattcatttcctgtcctcttttatttaaataccagtaagttttggagatgtaacttatagtaagttccttttcatttgcattcatccttgataagtattccattaatgtcaaagatgcgtagactatttcttgtaattgaaaatctggaatgtttttaataaactcgattgatgtgtgaacaaatatttctaaaagatcaaatgaatgtgctatagctgttttaagtgctagtttgttgctagcattatcactatcattatttcctgctgtatcaatatacttccttgataataaaatgtatccaaaatgataggtatagctagtaatttttgacacatccttggctataatctttttccatttatgtttccatttacttagttctttaacttcaactttttgttcatctatcttatcgttctggaaatcaataaagtaatcattatttagatacagcttaatcaagttctgaaaaaaatccaacttagagacttggattgcatctccgatagtagctttgggaaataaaatacttaaactatgaaccttccataaaatttcatttataagagtatttcttcctttcccaacagcatattcaagatgacatgaacaaagagagttcaatatccttaagtgaaataaatcatcgtcaaaataaattgccttatctacaactctatcaataatactcctcaaatcgactgaaataaagaagtgcattattccaattccactcaacaaccatagatcaatgtcacaaatattatacatgcaaatatagagaatggcttcaatatcatgatcagaaagtggatatttgtcgttgatactgaataaaatattcttcaataattgttcaacttcatgcattttttcactatttttatattcctttgagttggccattgcaatcaatacaaaaacacatgtaatcattggatgttctaaaacatattctctatcaatcacacttattccaccaggtataatataataatgggaaaaatctaaaaattctttcgataattccaaacaaagagcatcatttttcagataaaactccgtaaacttatctaatgctctaataaaatcacttctattaccattaagattttttccaaaaatacttgtttcaacgctctcaattagattcaatggagcagatttatcctttctttgtggtaactgtgcctttaattcaacaaaactacctatatttggtgtttcggtatcactactactcatcaaagatccgtcatttgaaaactgtcttcctctttcataacttacgtttttattgaaatttacaccgaaaatcccactatgatttgaattgtttaaataattgactgattgcggaattccatctcctgtattattctgtgaaacactgtttttgtctaaatttttaatcaagttttttgtttgtgactgcatttcaactaaacattcgatattttggattcatctttattatattatcttcaatatttttcaatcttactgattcattttttaaactctcgtttgcaacactctttatggtttctgatatatttccaagcttttcaattgtttcactactagtatacggtttagtagaacttagattacattcaattttcaaccgactgcatctttcacaacctcctagtatattactaacgcactttgttttcaattgcctgcaattatcacatgaaaatgtttttctttttctcttgttttctttaactggtctctgaggattcccttgagtcaattccctttttttgaggttattgacttgattcacattcacgttctcatttttctcatcatcactcaaaaatacatctgataataatagctgagttccagagatatgattgtttttttctagaaactcatcattcatgctgacaatgatacagtaatatcactaatgaggaatatcattaccgttgataaggaagttaatcattaactaacagatcaatgttctccatataatctcaactaacagtttgtgttgcgctgaaaattattaatattttttcgcttatctccggaaaacgtttcttttcttttgcacatgaaccatgaataagaacatagctttatcagataaaattgttttacttgtatgcatacttgactcaaatttatctcaaactatataatattaacctaatttacctaaaattactataaaagttgtagtaaaataccaaatgagtaaacggaaacaaccattgctaactttttagagaaagtagtccaatttgaacttgctccgtttttttgttttaagaaactttctttatttgaagtatttttattgttatcattaatacctggctcaccttgtgtactctcacctgattcatcaactaataagacttcaggttgtggatgacttacctgaaccacactcaactttaccacctctaacaactcttgcaacttcatttttcatccaatcactacaatcaaaactttctgatgatgatttcatgatggcagaacctttgataatttttaagtcattaaaatgattacttttaatgttaccgtgaaattcaattgcaccaccaacagatcttaatgatgagaaaaaatcaatctcatcgatttggtcattatcaataatcattaaaccaccaccaacttctgataatttatcaaaattaacatccttcaagtttttgttattaattatacttaatgtattaccagttgatttcatatttgggagatctaactttgtgaatttattatgactgaagtcggcacttttttcaacaatttgtaagctttctaggtttatatcttctgtatccttaacagttaaggttttaacccagactaagttaggtaatgaaactcttatgtttcttgcatttgcagaaattaacaactcttccgtaatttcagagacagtagattcaattctttctaaaaatctattgttgtttatatttaaagtttttaatgtttcaacattaaacccaccaaaaccagtaagtgaagtatcagacataataaccgaatcaatttttttaataccgctatcaaagttaacaaacgttaaaattggtaatactttccattttaatgtttctacacttttctaattttgggaatgatagagatgttaagtgaatttaaagtatttaattcaaacatcccaccaactgaatttaatgattggaccttccattcgaagtaatgaactacaatttttaacagtcaaatcacctttaacctccctaattgagcccaaatataaagtatcagaatcaaaatcagaaacatgaatgcttcctgaaattacagcacaatcggaaattgctgccaaatcaccagctgtacgaatattatattcagatttgaaacattttggttgaacatctgtaactaatgtttcaccctttttttcagattgagatacaaatttacttgcaagacatgtgttcaaaagcacaaaagttgaaaagcataatttacagtttaatttcatttttttaacttaaatatttttaaaacttattacagtacactttctaaagcaaagatcgttatttttcaaaagaacaaagcaaacaaataaagtatagaaagattatacaacatgttgattatatattatgatattgtagaaatatgaatgatgccctttttcatacactcaaatagtaacccatcatctaacatagcaagaaaaggggaaacaaaaaattaaattaaaaaataaagctttgctctaggcgagattcgaactcgcgatcttcagattatgagactgacgccttaaccagctgggccaccaaagcttaaatatttagattctgatcgaacccaggatcgaactggggacgttatgcgtgttaagcatatgccataaccaactagaccatccgaccaaatcttgaaagacgtactttggacattctctcaatcacatgtttttgcttacgtaattgtaaaaactattgcatgaatagtgtcaaaaaagcatttaaatcaaaaataatagggctcaaaaaagcatgtaattgaaagggtcaagtggaataatataatttcaaaaaatatgtgtgacaatgttattcttttaaaacattagcactcaattttgatgttctacatctacctaaataacattaaaaaatacctccataatgtatcaaataagagggacaaacatagtgggaagataagtaaaattaattattgcagtaatttattataaatatacagcacgtggagttacattcgaccaaagagaagagagaaaaaagatatctcaaatattaactatgagaataagcgcttgaaaaacaaaaaaaatatgctccatagtaatttaatctgattaagagacatccatcagcatagcgcgcattatgtaatggtattaatattacgacatacacacactttttgccctaaagattgcacaataattaaatcatttctccttttcaacctataattttattattttattatttttgattatacttgtctaattataacaattaccaatggatcataataatatcgatccctcaactgtagattataattctagtacgaatattaatccatctttaaatactattaaatctgcgtctgactcaacatcacctcaaaaattatcaacaaagacaataaacaatatagctggtagaaaagcagctaaatctttacgtttattccgagggtcaatcgctgatgatagatcatcaaatgaaattgtttatgatcgaagtagggagattaatattgaattaactcatccttgtactttaaaagaactaaataatgaacaagaagatggaattgattctagttctcaagatattttcaataataattttattcaaagcataacaacaccacagaggaaacaaatacatttaaatgaatctttgatatcaaaatctcgtgcaaattcaaaatcaagttctaattcacttcatgaaccacactctaaagtaacattttttgaacctaagaatgataataaactagcagaagataataacgtcgatccaattttatcaataccaaatcaaactcaaaatatttttcctaacaacaaggaaccagaatctgatataaataacttaccggtttgtgaacctgtttcctcagctgtttactttcctcatacccaaccaaatgaaaactctgatataaagcctgaacatttaaccgcagctgcagaatttgatcataatgatactcaagaaattgaattttttgatggtgagttaagtgatgaagatgaccttaataaaaatgaaaatcaaacaactaataaaaatgaaaaaactcacagtttcagtacaatagtagatagtattgaaaacggtaaaatagataacattatacaatcgaagtctattcttgataataaacataatgaagaacgtatagaagataaggatgaggaatatttattccattcttcaatacctaatgataataataattttgtggatgaaagtgtccaaaatttacctagtgacaatatcaaaagtttagaagatgaaaccaaatttccattagcagttgaattacaacctttcaaaaataaagttggtggtcatactgcaattttcaaatttagtcatcgtgctgtttgtaaagcattagtaaatagagaaaataaatggtacgaaaatattgaaattgcccatccggagttgttaaaattcatgcccaaatatataggagttttaaatgttagatatagtacattattagatgattctaatgaaccaagtgattttaatgaatctaatagattactatccacccaaaatgatgaattaactttagagaaaaatttacaagaggaatcgaaagatatttttaacgatgcacctctagataaaactaaatctttagttgatactcttccaagtatgactacagaagctaaagacaatttgagatttaataaagctaaaacattactgacagatagatctaacagtactaaatccgaagaatttactttccctgaagtagtactacaagataatatccatattgttccaaagtctttatggagtcactataaatcccccaaagaagaaaatttggaactttctattccagataatcggaaaaaagatgataattccgctctcacaggttctacatctgtaaatacaaaactcaaagaactagtcttgagtgaagtttttgccccaatcaaaagttataccaatagagcacgtgcaaacaagagattctcacatcataacaacaattcagctgcaaattctagatcaaactcgatgtcaacaaataaaacgatgcctagataccatagatattcgacaagtagtatctcatcaccaattgcactcaagtttaatgaacattcaaatgatattggtagaaagattcctgatagtataacagaaggttgcatgattgatattacaaggaatgaaagtagaaacaattcaattattgaaccatcatctgttcaaagtgatgatatcaaactacattacaagtacagatctgattcagcatcagctactgaaaatgatagtttgagttatcctgatagagaaacatttatatccaatttgaagaagttttccaataagaaagatgatagtgaaaatgcaattgtagatgatgatgacgaggaagaagtaatgaaggaggaatatgttaccaaaaatgccgaagaaactaatgatagtattttttcaatggatgaagaggaaccagttgagaaaaatatggccattgaatctgaactaaatgaacgaaaacaacaattattaagaaagcataccaggtttgaaagatttatattattagaagatttaacttcaggaatgttatatccatgtgttttggatttaaagatgggtacaaggcaatacggtattgaggctaagactagtaaaaagtattctcaaagaaagaaatgttatgaaactacatcaagagaattaggaacgagaatttgtggtatgcaagtttgggatatgaaaaataatgcattttttaacagggataaatattttgggagaaaagtcaaagttggatatgaattctttaaatcattatcgagatttttatatgatggaataagtgtattttcaataataaaacatttaccaaaactaattgaggatatgaatgagcttattattagatttgaaaaattgattaattatagactttacggatcatcgatcttattaatgtatgatagtggaaatgatcatcaacatagatatgaatcaacaattatagttcgtatgattgattttgcacaatgtgtcattggaggagcagaagttgaattttcaagtaaaaccacatttccaccagttcatagaggagaacctgacgttggatatttaaggggtttgaaatcattaatatattacttcagtttaatgtttaaggagtttactggaggttatgaatataatgggttcgaagaatcttgggaattaatcaaaaaattggatagggataattattttgaacattcatgtgaatggcttgataattttgatgatgaggcaattcagtgcccgataaaaattaatccaaaaccgaactatgatgataaatatgaggacgtttccgaatgatggatcagtagtaatagttatagaatttcttatagctttttatagcattcagtagtgtatttttttatgtattttaatttcatgtatagaattatgttaaattcagttttattttacaagttaaagtatacataggatttcaattgacttaaaatgttggattcattatagggttagttaaacatggaagaaaaaagtttaaacaaccgaacttagaacccaagaaatcaatctaccagaaatattgagactctgattccgttgagagtctagaaaaaagagccaatgtcttctggagtgtatattggagaatgaaggaaaattcaagaagaagcaacatattggtgaaaaggttgtcaaccgaaaaaatggtgaaaagtgcactcactgtgtcaattttcagaaatttcattagcatcaagggtttttaatcaacttaagtttatatgaacatataaatctaaaatacagagaggttttgaatacacacatataactatactttaattttattggatattattgaatataatgatataaatcctacctgttttggaataaatgtaaacaaattaagcgttcttttgatcattacttataactgctaatgcacatgcacgtaaatcagtcaattgcgagtaacatttactactactattaccttcattatccaaagccagacaatcttgataattatgaataacagaagcacatttggcttcaatattatgataaacgttgacttttgttttaatacattcttgtaaatctttttgatatttagaacattcagatttatctgttactgttggatcatccatacatttgtgaaatcccagaaatgattcaggacatgttttggctacttctttaatgataaattcatctagaacacgtgaagccatgttaagtttttattatatgatggataaataagttaactaataaagaaagaatagcatgcatgattgaaaaatcaaattggcaagattttttatgttcaatttgttgatatttaatcattactccttatctacatgacattatatgataccccgtgatttggattttgtgcaactatctgcaaaggaaccaaaattaattaaatacatcgattcaagcacaggacggtttgagtttgataatcatgatgccctcattgaacttacgcaactactaatacgattggatttaggatacattataaaattaaaacgagagaatatttgtcctaactatttcaacagacttgattatgttcaatttattagacaattacttttattgacaccaaaattagaaaacttcaagattgtcggattggatattggaacttcacaatcctgtatatacccattaatatgttctaaatacataccccagattttgaaaatgtacgcaactgatattgttgctgagtttattgacaatgctgttactaatgttgagatgaataatcttcagagtataatccatcctaagttagtggataaagataccaattattttaaagtattagatgatgagttattggattttgaaataacatcatttactatgtgcaatcctccattttattcatcactaaatgaaatgagctctaaaaacggaatgaagggatcatttataaagaagttaacagttggacatccatcagaattgattaccgatggaggagaatttaaatttatctcaaagatgttatcagaaagtgagttagttaaaaacaaaatcacttggttcacaacattggttgggaaacactcaacagttatacatttgatacctcttctcaagtcaaaggaaaattctatatcatatggaatacatagattcaaatctggttcatttactactcgttggatactattctggactttcaatatggaatgtaaaccaccaattgaactatttaactattatacaactaaattgaataacaaaaagtttataaagaaagtttcttttgataataatttgagtgagattagtattaggacaaaggttttgtcaaaattgaagtcacttccctatatatcattgcatttgaaaaatacaatctccatcactttacccggtgatgtattctctcgttcatatagacgttctctcaaagtcaaaaatgacggaagtgtttatatctttgaaatattcttagaatctcgttacatcatatggagaaatggttataactataaaatatttgaaagctttgttaatatgatcaactctttatagtttatatttgtttcaagtatccttgttgaattaatctttcgacatctacttttctgacaaaaaattgtgaatctttagttaaattgaaaacaccatattccgtcataatttcacctgcatctttcaatactcttacatcgatgaaaacatcactcggaggttctaaactaccacctaaatcaacatctggcataacacctttcataccacttaccaaagaagtatatttttcaaggtatacacgctcattatgtgataaattagccaattgttcagaactaagttctatattatcccaaaccatttcatctaattttctgattcttgacatttcatatgcgaaaaggcatcttttatttcttgcaataaacatgtctttaacaaattcaggtaaattatcaaggacatgttgaacttctgccgatttattattttttttgttgctgttgttatcgttattacctggggtattattgactgaagatgagaaaaaacttgtatctgcagcactttttcgtggtgtattcataactgatgaattgaatgcagaaatattggtattattagattgatttgttaatattggttcattacttattccatcaatttgcttttgtaaatcattagattcattaatgatagattgaactatttcattttcaaagagaggaattttgtctaggttattagctcttttagcagataacactaattttgtccctaaatctccatacatttattttggggagtacactggtttaagaattttgcggatagaaaactagattgatgcattcatatataatattaaagtaagcgtattgtaatacgaaaatattaccccctatgggggaaataatttttcctaagtataatacgtggattacgtaagatttgtataatcattaggtaagcctacagtgtatattctattcaaatctatttacaacttgtttgagaccatcagtaacattggtaacatactactagatccattcaaaagaggaaagtttaaattaaaacctcccgaagagggattttttgatttcgatctagttattaaataaatgtaaaaagaatttttacttcccatagtaaatttactaaaaaattgttcaaaaaaacacgaaaaatggtcaaaattagtaacgttaataaataatgttaaacaacacttttaaaacatatagagtatcttttctatatatagagacttccctctttccaatgatactatttagaagtacccaagtattgtagatctcccacggaaattgattgaaattttgtatggtgtaaactttgaacgttcataactcaatcaattttcaatatttttacaaactaacaacacagatgtttgattcagacaattctctatctacatgtctaacatgagtctgtgtggagctctaacaaataagaaaaaaatttagaaactcacgttttcgagcgttacgacgtattatacttaggattagaagaaacatgcaggtagtttgtaaaaaattgaaacacgaaaaaaattggcaaaacgcgaaaatttccgtatattacgtgatgaattttcttaattttcataattacagatgatagatataaacaatgaaatttattgttgttaaagagttatttctttgcttgttgcagtcaatatataagcaaatatggcagggtatggtagattgaaaagaaaaaataatacaaaaagaaatgatttatgtttttcaccaactaaattttcatctggaagcgataccccatctttagttagctcagtgtcttcatgttcatactcatcaagtgatattttttcatcatcaagggaagatctatcatcatcattggatcatgcatttgatgacttctcttcacaagttcatgttgatgtcagttccccaatcataaaatcttctaaattacttgagtttgagtctgtatttaaagaatttgaggatttagaaaatgaagttcttcctactacaaataagtttaataaatttaaaaatatcaatttattaaagaagaacgaaggagatgaagagtttgaaccaattgatcttgatttaaactcaagtatttcatcttctttgatgaatttaaatacccgtatattggaacttcaatccaagattaattcagaggaacttgaagagaaaattgaaacaaaaaaagttgttgttatagaaaggaaactaactacacagaaggcactacgacattatggtgatacacgaacacataaaatcaaagaaaagtctctatctgatgaagaagattcagatgaagattcagacgaagatatactgccccctagtaaaaaaacaaagagagtagatgatcaattcgatttaactagttgtcaatcatcaaatgaccttcggtttgcaagtgaattggctagaaagaatgtggggtttgatatgttaattgaagaaatatgagaacacgatagttctaattagcaaaaaacatcatttaaattgttgaatacgaatactaaatgatttccttgagttgaattgagaaatagtatttaaacaaatgcctctctgtttgtttattcttgttttatttaatatatatatatatatgtataaaatatatggtctcatacttagatctacatttgaacagattaactttactacatcttagatccccattaagaaatacaattaattatttaataaattatacaataaattaaattaaatacattttaagtgttgagccgagggtgctttgtttacaattaaatgtaaacaaatggttacgctatttatcctaatttatttcatcgatcaatcttttctactattgatttgttataaaggtaaataaatatacaattttttgttttaaaatatttcaagcaaagttaaactcatcattttgtgacttaacagccaatctagccaatctaaacattttattcttggcactttccttcttattattattgctttcatcaccagctgtagtactcttagttgctaatttctttggagtttctcttaatccaaaagctttagctaaatgacccaaatgaatttgtttgacattaaaacaatctctttctgttgataaatgcgttgcataagctctaacatgactgataaatccatcagttgcaatttctaaagctctttgatcttcaagtaaccatttttcaagatttaattgataagtagttgcatgcatatcccaagaaccttctctattaaatttattacctttcttcttatcttctgattcatcttcattagaatctttaccaaatgcttttgctaaaatatcttcgtatttcaaaaatttaatagtattttcatcatgcattggtgttatcttttcaatatatttttcttcattaccaggcattaaaaataatacagagacaccctttttaccaagtcttgcagttctaccaacacgatgtaaatgatcagcaatacagaagggtggatcatattcaataacattatcaatttcaggtaaatctaaaccacgagatgcaacatctgtacataataaaatagtattatgagtattatcattagcaaaatgatttaatgtagcagtacgtgtttgttgtgaaagtgaaccatgtagtttatatacaatagtatttggtgaaatatttggtgatgtcattgcagtaatactacccgtagaatcttcttcttctccttttcctttttcttttgcatctttcttttctttcttatccttttgaactttaagacgtttaccatccttagtaagtgcaataaaatggaaatcaactgaatgagaacaacttaaaaatacaacagttttagaatatggactttcagaatcttctctttgcgtcatattcatcaagacaccacttaatgtagtataacgtaattttggtggtacaacaacaatttcctgcactaattgatctggtgctttcatatgatgatctaattcttcattacctgtatatgtattacttgcacttataatttctggattatttaaagtaatttcacctagtttttttacattacccttcaaagttgcagaacataacacactaactcttttaaatggtaaaacatcagccaatggacctaaaacttggtcattgtctctataatctttttgtaatctagcaataattgtagaaatcgattcttcaaaacctaactccattaatctatcaccttcatctaatattaaatatctaattttagataaatctaaagattgggtattttcaatatgatcaactaatctaccaggagtagcaactaaaatgttaataccttttcttaatcttgccttttcagctttcttcttctcaccaccaatgacaatacctggaacaatccaattacatgctttcttacatagagaatcttcaatgaaagaataaatttgttgtgctaattcacgtgttggtgttagaatcaatgcataaataccactttgtctattgatcttacctttggaagataataacatatttaaaataggtaacgtgaaagccattgttttacctgaaccagtttgggcttgcatgaacatatcacgaggttgaggtggaaaaggatttgttcttgttctttgatgtcctaatgatataagtttaggtatagccattctttgaatttttgttggttttaaatatttcgaatcagttaaacatttaattaaattatcatgtaatcctagagctttaaaacctgcattttcatccataactggagcatttgatggttttaaattatcttcatcgatttcaatcttataatcacgtttttgaatttctggatttgcagtgaataatgatgaaacgattaatccttgttctctatttaaagcttttaattttttattactttcatcatcatcagcagtatcagcagttcttttcttacgttcaccaacaggagtatcatttgcaccagaaatacctttacttttattctttttcttatcagttctacccatactagctaattgtgcctttcttctatctgcccatctaccacctttaactttaggagcagatttcttaccctttttggaatcaacagttgcggaagcaccttgtgctggcattgcaaaatttagcatcattccatcatcattatcagccatgattttatttgatgtttaatgtttaataaaaaaaaatcttcagttaaagtttaatgtgaatatttggtaaggaaaataaatttttattgatgaaaaatattatggcacagctttgaaatatttttttttcatgcgacatcaatcaagaatattttagcaataaaaaatttattaataattttgaaggtttgtttattctaattaagcaaggatgtcatcattatttgtagcagaggaagcagaacaagaaatagccgtgaaaatagaacatgatggagatatagaaatgaatggaattgaagaaaataataaatcaaatggaactcaagtgaaggaagaacctgaaactgaagaaaagaaatacaatcaagatcatgcagtatctgatagtgaaagtgatgatgatgatgatgacgatgatgatgacgatgatgacgatgatgacgatgatgacgatgatgatgatgatccagttattgataccatacctgttcacttaaatttactgaatgaagatatgctttcaccattgttattacaatttccaactaaatcacgtcaatcaaatttaacgcaaaatcatatatcagcattacatagattacaaataaagccaaaatccggagtcgttgaattgagattaccattaaatacagatagttttttcagtaatagtgtcagtgaaaaatataatgtttcagaacaatatttaagaggtattattatacatgatgaaccattaggtgataaaaaagttggtacaataagttcctcatcattaatgaataaatcaaatgcagatgttaagaatgagaatgaaaatgataaggaaaaggataaaatgaacagtttcattgtaaatacacaagaattacattcaaatttatcaagtattcgtgcacaacctggatcaattggtggtaatagatatttgattggtatacaagatgagaatggtgaattacatataacaccaatttctgatacttgtatgttacgaccacattttgtttatattgataatactaaattaagtaaaattgaacgtgaaagagaattagagagagaactgaatgaaggtaataataataaaaatgaaaataataatgaagaagagaagaaaaaggcaaatgtaagtgttgttacaatgagtgccaaaagtacaaaggagaatttacctagattaggtggcgcattactgagtgcaaagattgaaaatgaagaagatagtaaaagtttccaaattatgccatcagatggagagtttataaaagaacaatttactgaaaatagtggtaatgtattgagttctcaactttcacaaaatgaatatttagatttactattgaatcaagcacaattagagtgaactatgtgaatgggagaatgtgaataaataataacattagagtctatacacatttttataataattaataatatataggattatattgaatatggtataagagataaaaaaacaaaattaattttcaatcaatctatttggtacctaattcaacgactttttcagcagcattatcaagatcttcttctaagaataattttaagccggattcattaatcatattctttgcaatttcgaaattagtaccttgtaatctaacaacgacaggaatagttaaacctaagtttttagttgcttgaattaaaccatcagcaacataatcacatctaactataccaccaaaaatattaacaaagatagcagaaactttcttttcagttaaaattaattcgaaagctttttcaattgtttcaggagttgcagcaccaccaacatctaagaaatttgcaggtgaaccaccatataatttaacgacatccattgttgccatggctaaaccagcaccattgacaagacaaccgatattaccatctaatttaataaaatttaaaccatattttgaagctgtaacttcgtcagcatcttcttgagtaacatctctccaagagaaaacttccttttgtctaaaagctgcattatcatcaaaattaaattttgcatccatacacataacatcatgttcctttgtttcagataatggattaatttcaatttgagttgcatctttttctttaaagattttatataaagtttgaattgtctttgcagcttttggaactgcttcttcagtataacctaattgagaagcaatttctaatgataaattatcggagacaccttcatcaatattaactgaatatttcttaattgcattaggatctttctttgcaacaccttcaatatccataccaccttgagatgatgcaataatcattgttgattgattttttctatccataacaattgaaaggtaagcttcttgtaaagcatattttctttcaacaacataaacagcagtaacaattttacctgcttcaccagtttgctttgtaattaatttatgatttaacattttttcagctaaatcttttgcttcttcaggagtttcaattaatctaacaccagatttaagaccattatcaaaatgacctttacctctaccaccagttaaagcttgagctttaagaaccatttcattagtatttaaatcttttgcagcaatgaaagcttcttcaggagttcttgcagcttcaccacgaggaactcctactccataagatttaagtaaggcagctgatctatattcgtgaattgaaagatttctaatttgttggaaagattttctaactacgttattattaattgatctaagcattgtctttgatagctgttaaaaggagaaattggcctttacaatttatatataatttaaaagaaatgggaaaaaaatttacacaaactgggggaaaatacggttgatatatttaaaaaacgtaaaattcaaaatattaatttaattgaatggtttcctatagtttcctcttttcctcttttcctattatttcccgggtatgtgcaaacaaggtcattatcaattatttagtgacaccggcttccgctcgcccacctgggggaaaaataaaatgaatagagattacgtaaggattcaaccggaaaattaaattaaaaaattatttatttatttgaaaattccgaaaatttcgagccacagagtcgcgtcgtttccgtggggatatattatttccttatcagtatcgttatcagtattatcatctattttactttgatactctttgttggtaaactctccaattcttgcattgaaataatcccatactgacacggttttatcttctattttaccctctattctcatttgctcattatcacttaaaaatgtaccgtattgtgctgcatgtaaatgatatactaaccttcttaaaaatctttcattaaattcaaacttattaggatatttcttaattaaacaataaatacaatgtaaaaattgttggaaaactggactctctaatctaaccgtttgtgaatgtttatatctttgtgataatctcttaattgctgaacttgatccattctctctataatcataaaatttatgatcattttgtaaatatccattacgttccctaaatctatgaccaaaggagttccactccttttcaattaatacaataaatcctttaattgttctataatatggatcaatacaaatttcaactaatgaacttatttgtgatgtacgatcccatccatcagaacaatgtactatcaaatgattattctctttatgaattttatttacaagtatattcgtaccatttaataatctacgaatatgttctaaccatccattactaacactatcaatattcattatccctttattaacatcactctcttttaaaacactcttgattttattcaatgcatctctaattacatgaatattctcaatattaaggaaaatcctctctgttccctcaatataattatccattatttcagtacctgcaccaagtgcaacttgtgccattgcattagttattggacgacaatcaacaattaaattattcggacttctatcattattactcttgaaaatcatttcaattaatttttcatcttgtactgatctattttgctttataccaactaatggttgtgaacatctaacaatactacaaccattctttttataataatatgttaatgcaggaaatctattctttgatctatatttaacactatgctttaacatattatctgatatatttgatggtacaatcaatttacttggataactatcgcataattcaaagttattatttaaattagtaattctccatgaactatcaccactaccatccaacattaatccttgtctagtaaattctttcataaaatcataactttcccatccatttaatcctgtttcaattttaacaggttgataaataaatgcatataatttgttaatatcatcaatacatgataatctcatcatgctatcgaaaacatcttgaccttttaaaatatttttgaaatcaaatgcaatataattaaaatctctaaattgaattctcaaacaacaacctctatttaataacttttgtttatcttcacttaattttaatttttcttcactaataccattattattataattatcttcactaccaatcatattccaaattccacttgttataccattattatttgataaattacttaattctttaactacatcttcctcaaataacataactgaccctcgatagaattcaactctttcaatcattggataacaaaaccaaaattctcgtccattccccttttcaatggtaaatattatatgatgtgtagttaaatgtaatgtaccttcatatttctcaccacgtcgatacatatgaacatctcgtacctttgtcactcgcaagtattccatattataacaaaaggttcaatggttatctataactattatatacagttctaataaaagcatcgttgctggcaaacttgcaattgttcactattgtccgtatactgacaataatcgattttcctcaatgggggctcagcatcttatacattataatactaaatttactactactactacaattgtttgatatcattaggtatccatttgttttccctccatctcttggaatgggtcatctcgtagatacgactaactgctctcttgtatgagaacatctcatcatcccctgtgaatttctttaaattagtataatttttagattgttcactgttattaacattttccgtttcattgctcatatgataatccttattagaatcttcatatgttgcaaaattaggtctataagggttggataaatccatttctgtcttagtaaacatttcataatcttgaacttcgtttgttacagaatcttcaagtggtgtacacttaaatcttgttttatttttattaatttcctttgaattgaaaaatatttcatcaatattactttcaatattaatcattaattgacatttacaatcataaattgcatcaataaatgaaatcaattttcttgcttgatttttcatattattagttaaattaggtatttcatcaattataatgatttggaaatttgatgcaattgaaacaaaatcacaattaccatatttaccatctttaataatatcattaaatttaaaatatgcaacattttcattacatttaggtattctaatctctctactataattctcaaatttacatgtattggcttcacaattatttaaatcaattacacttgaaactaattcattccatcttttcttatcatctcttaaaacacaccaattgtcatcttcattatcttcaattttcctatagtctatatcatttgtcatattccatagttcacatcttgcctttaggattttttcaaaattttcaattgaatctttgttaattgaacccgaatataaatcttttggtaatttatttgaacttgtaattaaaacaccacctaatttgaaaaaataaataaataaatgattaacaattttagctgatgtaatatcaggtaacataaattcatcaattattaaaacatgatatttactaattaaatttgatgcaatttgaaataataaaaattcattttcatatttcaaaattgaatgatttatttgttcattgttatctcttttgttaattgatattttttcaatttctttaattattaattcaatgaaaactaaccaatgaattctaattttacccttaataggtaatgaattggcgaaaatatccatcatcatacttttaccacatccaacatctccattaattaataatccctttggtatatgttccatttccctgttattatacaattcatcataatcattaaccactttaattaattttaaacattgttgttctttacttttttccttatcaatcataccaattaatctatttctccaactttcatcttgcgataatttaatttcaatatcacgtataagtttattaattttaacatcaactaaatttggtttataatcttgtaattgttttgataataaacttaacttctttactaatgctaattgatgtggatctttcttgattttttcattcatcactaaatttttataaattaagtaaggatcagttataactacttgatttttcaatgtgctactatatcgacgcaacattatctttgaatatgatgtatacaaaagctttgataattgttctttataaagagagatataatataaaaatgtataaatttaattatacaaaatagtagtagtaataaacttagtaaaatcagaaatcattttttttcttcaattgtcattagtctgtctataattgaattttattttgtcttctactaacaaatatttggaaaccacagaagataaagaatgcaatatataatataattgcaccaaaaattgttttagcaacttcatcaccattttcaggtgatgtaattgatcccatcattgattcatgattaattttaaataaaattgcaataactgataatatcactatcccgaatgcggatataacggtacaaaaccatgcttttgctggctataaaaataaatgaaaaagtattgttagtatttatgtttctaaaagttgtaataaatcactattaaacatactgatacgattgctttcattcttggataataaagaataaacaataaaatgattatagaaacttgtaagattagaaaaatgaagcaacactttttatttttatagaaaataattcatcgcgtatgtactgtgattacactctgtgattacactctctgattaagagttgttttaatggtttatttattattatacagaatacatgtaaccatatacattataccggatagttatagttatagttatagtatagaaatacagttagtaacattacaaagtctcattcgatttaacttgtaattttgctctctttttcaatctttcaacttcatcattatcacgttgatgagatttttcaacaactaaatcacgtagtaatctattctccatttctaattgttgaattttcaatttaagtgattcagctaattctttactttcttgtaaattcttttccatttctaattcctttaatttcttcttttgtctaaatctaacggatgctgtacccttggtagatcttgaattaatatcagtgtttgcctcagatgatgatacattattatcctttataattaaattaggaattattagatggtgttgataatgttgtagttaaaggagttgttgtagatggtggcgattgagctgctaacaatgatgtagatttacgtacagttaattcagatgtttttttattgacatcaagatgagaatttttaaatgtcagtggtctcttattctgtcgaggttcaactgatgatgttgagcgtgttatttgtggttgctgtgatgatgcttgttgtgataattgtgataattgctgtacaggttgaacgggttgttgaacagattgttgttgttgtacagcctgtatcgattgaacttgtgataattgttgttgaacaggtatattcaagttttgattaggttcaggtacattaatattagatagtatctgtgtaagaagattttgctgtaaattttgttgttgttgttgttgaggagtaagagcagatgctaaagtttgtgctaataaattaaccaataaattattttgttgaggttgttgttgttgtaatggttgctgttgttgttgtaaattttgttgaaaatgttgttgtaatggttgctgttgttgtagattttgttgtgatggtacttgttgaatattatttattggtgataaagctgataaactttgatttaaacttaaaccaggagatgaagcttgactaatttgatttttgggatcacttttatgaaatgcaactaaacttgctaatgcatcaatttgactttgtgataaacctgcagcggctaaagtattttgggcaccttgaggaattgaagggagtggagttaaatttgaggtaataggagtgttaggtgtattaggagtaattcttgcatcattaaattcgttaattgaaactgatgttgtattactatgattaccattgctttgatttctaccactgttattcgtattattgttattgttgttgttgatattagctgtattattattattattgttattagtactattgttattattgttgttgttgttattgttattactattacctcttaataattcattaatagttgaaggtattgaagccatatgttgagtaattgtatcttgataagtaaatttttgctttgaattattataacgttgagataaattttgataatgagttgcaggtattggaggagttattgcatcatttggagatatatgatcaaaaccaaatgacatagagttattagcattattagagttattattgttatttccattaccattatcattaccatttccgttaccattactactatttacttttggtttatcttcatcagggaatataaaagtatcattggcaaaagcagctaattctctctgtaattgatcatcaacagattcattagtttgagctgatggagagtctgtatgactaaagaaattatcaatataaactaactgttctaacagtgccattggtgtatcatcagtacttgaacttccattagaattgttattgttattatcactattattattgttattattattagtattattaaaaccaccagtgctttgattactggagatattgttattagcacttgacattaccccttaataatcaatttctaaataacgcaatcaattaaatataatgaaaagatcagattccaaaacgtgaaaagatttcaagtttaattgaatattgaacaatatatcccataattgatgatattaaagttatttttatcagtttctattagtaaaacataatttaatatcaatgtcataaaatgagaattttttttattagtaaagaataagccacactcgcaatctcacgtgttattcgcacccggcacgtgactgtttttaagtgacgacccaccacccttgctaccattgagatacttctttagatagtgatacaattgaatcaacactttcctctggtataccacctctgattgctccaatgtaatgaccacgtagttgttttggtacattctgtggtactaatgatgataatacaactatagctgtatcttgttcatttaatatactacaatcactcaaaacattaccatatacattcccaattatccaattccataatggttgatgtattttacgtaattgatcttcaacccttttacttatctttgtataagtatgattccaaaataattcacctcttttaatattattattgatttcaaaatttctataatgttgattgttatagtaattattattaattttctctaatatatcaattggtgttacatcatgtaatgcagttaatgaattaattgcctttggaacaccggcaagtggtgcacttttcataattgcctctctaatacgtaatgtacattcaactctatcattaaataaattcattgaattaacaacatatttataaatttctgcaacacattcaggtttattacttactgataatgtaacactacctataagataccatgttttagcaggtaaattatcccatttttccattctcaataatctatcttttccgataagcattctgttatttatatgtcttgatttgtagatgtaattgttaactcaatcaaacgttattcactaagagtttttttttattttataaaaattgaatagtattttttaagttaaataaataaatagcatttacttagtaaaacgcgaattcaacaaaatccacttactttctacattcccatactggagtcaatactctaccgttttcataatagcttttaacattatcgagaacgtgaacttccattgatttaatagtctcacttgtagctgctcccatatgtggtaatgatgtaacttgttccatactaacaaattctttatcaataaatggttcattttcgaaaacatcactaccataaccataaattttaccgcttaaaatacctttcttaattgccttttcatcaacaactggtcctctagctgtattaacaattgtaacacccgtcttcattttatcaattaattcttcattaataatatggaaagtttccttatttaatggtaaattaattgaaattacatcactctctttaataagttcctcaattgtactacaatattcactatctttttctaattcaggacttaatctacttctattataataaacaacttttttcaatccaaatccacttaatctatccctaactgtacatccaatacctcccatacctaaaataccaacaattttattttgaattgaatgaccaagtggtgtacttgcacaattaacatcattctcccatttaccattcattaaattattatgacctaattggaaatttctcattgttgctaatataaggaataaattagtatctgcagttgatgcactaactttatctggaacattagaaacttcaatattaaattctgaacatgattttgcatcaatttgatcatatcctgcaccacaatgtgcaatacctttaacattagtatattcatttaataatgtaataatttctttatcaaaattaccactaattgaagcagattgaaatgtacgtgcaataaaatcaacatccttaaatttcccatctttcaattcttgaatgaattcttcccttttagtgaatgttggttcaactaattgaatatcatcacttttacagaattcattccattcttcttcagcaaatctaattggttggaatcttagtactgtgaaaaccattctggtttgtctgtctctttagatataagataaataacatttatatatttatataaatataaatataatataaatttatataaatttatataaatataaatataaagtacatagataaaaataagaataaaattaaaagaaactaagatctattgataaatttttaggtgaaataaaaaaaacggtgaaaagtggaaacttccccgactttttttcccaatcaagctaattccggaacaatcgcgataacttctccattgattagatattgatccacattttccacaacaaattcttccattgctttcattgtctcaaatgaatgtgtacccatatgtggtaatgaagtgacttgtggcatattgattaattccatatcaacattaggttcattatcgaaaacatcactaccaaaacctttaattttaccattttgtaatgccttctttaatgctttttcatcaataactccacctctagctgtattaattaaaataactccatctttcatcatattaattgtttcatcattaattaaatgttttgtatttttatttaatggaatactaatacaaataatatcacatttaccaaataatttttcaatactttccatataaattgctccctcttccaattcttcacttaatcttttacgattataataataaatatttgcaaatttaaaaggttttaatctatcacgaatatcacgtccaatacctcccatacctaaaataccaacatttttaccatttggatcattaccgattggtgtattagcacatttaaattttggccataaccctttctttaaattttcacttgacatttggaagttacgtaaactacctaataataaataaattgcagtatctgcagtagcatcatcgactaatttgggaacatttgatactttaatatctaattcaccacatttaataacattaatttgatcatatcctgcaccattatgtgaaattaatttaaccttagtatgtttctttaataattcaattaattcattgtcaaataatcctgtttgtttgactgattcaaaagttcttgtaatacattcaacattattatatttaccttctttaacttctttaataaattcatctctactggttgctgtagtttcaagaatttcaatattatgtttttcactcaattgagtccatgcttgttgtgcaaatctaactgcacccagtcttaaaattgtacgtgtagaagatgtaacgtagttacgggtacctgtaatattcttaatcatctttgttttattatgaagaaagaagataaagaaaaaagactcttaagttgaaaagcggaaaagtggaaatttggtattatcgtaatattatatgtcagtttttcaatagtaattctcgcgtaaatatactactctggtacacttgatcccatatttgatcccatatatttgatcccatataggtaataataaacaccattttgatatattattatcctcgatacagggtcaagtaccaagtgtcagcactaacttatgaacatagttccaagaactgtttatacgtgcctttctatatctcaatgtaataacatatacaacaatcgaggatggttggtatgtaataaaacttagtttatgtaataagacttagctatagaaggagaaactatataaaagatacaaaacaaaataatcaatattaatattgaatcttgacctaaattcaagatataactttccacctgctattgatatatattcatcaaatagcgacataatgaaaaacatgaatctcaatctagctctctaactttaactttggaaattttatttactgtataattactgctgatttctttccataaccaggtatatataggtataagttatcatgtctagtgataatgaaattgggtttgagagctctaaattaggcacaaaggaatattgggatagtttctataaacttgaacataataattttaaagataataaggaagatattggagaatgttggtttgatgcatcaaatgctgaaaataatatgtgtgattacatttttaatgaattatcaaatattataataaaggaagatgttaaaatttgtgatttaggtacaggtaatggacatttacttttccaattatttgaagatggtttaaagggtaatttaattggtgttgattatagtgaaacaagtgttgaatttgcaaaagatattgcagttgaaaataattatgatgttaaatttttcaaatctgatattctaaatccaaaagattcatttttaattgataatgttaactcatttgatataattcttgataaggggacttttgatgccatttcattaaatggtgaaaaattacatgatgataaattaggtgtacaaatttatcctgatactgttgcaacattattgaaaaaagattcaattctacttataacttcatgtaattttactgaaactgaattaactaatcatttaactaaaaatggacaattaaaagttttcgggaaagttgattatcctgtattagaagtttgcaggtcataaaggttcaactatttgtacagttgctttccaaaaagtataagttaataccttatagagagtaaataatacttttaaaatttcggtgtgtgaataagaaagttttcaaatattgttatagcagttgtaataataagaaacttgtacttaatttggtaggatcactaaggatacattccctggaaagggaataatcaacttgatcatcacctgacgcttttattattaccttttgtttatataaaatttgtttatgtttatagaatctttgtacttttacatgtaaataacgtattaaaaaagtttatgaattattcccaggaatttgttcttgaaccttatcaaataatttttctgcgttttcaggttgtccaattttaattgcatattgtacaggttcaccattctcaattagttgcaatcgtataaatttattactcattaatgaacttggcataccttttaatattttaaattcttttataattggtacattaagaattaattttaaattaccattctgtctcatgacaattcttgatgtatatttggcatctggtaaatttttaaatttattaactttaataacaccaaaacctctctctttccatccttctttagcattactcaattccatatgatataatttagcctttatttgaaacaaagtttcctcattttcttcacctgatttaacttcttgtttctcaagatgaacagttttataagaatctgatacttcctctgttggtttttcattatcatttttcttttgttcttcattatcatcattttttttagaattttctttttcatcatttgttgatggttttatttcatcaaaaacagatttagatgaaatagctgcttgaaatgcattaccaaatgttgaacctgatccaaaaattggtttgctattggaattgtttacattaggttgactggaaaaatctttcttttcatctctttcattgattttatctacaccttctttatcagtatctaatttcttctcagtttcagctggtttagagaatgcaccgaacattttaaatcctcccatttgaccaaatggtgtagttgagccaaaaacaaatgatggtttatcctttagtatcttcggtatcttcagtatctttactttcctttgtttcttcactaactttctccaaattggtgtcaactttttcaacttgtttcacttctttctcttctatgttctctatatttgtcactgtgtctttatcagttttcaaaagtttgctatctctaccttcatcatctttactgccatcgttcaaatcctcgaatgatcttttcttctgatcctcactcatcccagtgtatctctttaattacagatgaaacctaacatcatttaaaaataaaatttgaatacttaaaacttctaggaaacgatatacaagttgttttaactaaatcaattttctgattatgtaatcttggcagacgcgacgttttgaaattttaattttaatttttttttccgctttgtttacatttcacgctttcgtattgtttacattccgatttcttagttttataatgggaaacccttctttcagttttccgttttggtctttcttttttgttttggagaattgtttattaaattcatcaactagagaagtacttctgcaatggatgttcatttagttctgaagtctgatccctcttctggtaatggaaccccaattttccaaaaatcaactgaagagaataaaattattttcccaaaatttcaaacaaaatttgattttaaatcaatttcttatccaaatgacaatgtctttgaaaaagcttcatattcattaattaaagataaatttttcaataaaacagattcccttttattaactctgggtccaacaaattcaggtaaaagtcatttacttttccaaaatgataattcaattattgagaaatcattacattgtatatttgaaaatattgatcaattagctaatgatattacaccaattaaaaaattttatccaaatattaaaaattcatgtgaaatgaataataattttaataattctgtcattaattctcaattatatttatcaatttcaatgtttgaattatataatgattcgattaatgatcttttaaattcaaatatgattaaaaatgatagaaataatttaaatattgttacagatccaatagatcataaacttactcctcgtaatattactaaaacgttagttaattcatatgattcagctcatgaaattatttttaatagtttgaaaaataggaaaactttcccaacttttgcaaataatcattcatcaagatctcattgtttcattgttttcgatcttcataaaatttatggtaacgttttagaatcaactagatttacaatcgttgacttagcaggtttagaaagatcaaaatctgctagaacttcaggtatctcacttagagaggcaagttatactaatggttcattaactgaattgggtagatgtttagaacttatttcaatgaatcaatttcataaaacttgtctgagaactaataaattaactaggttggtactcaatgattttgttaaatcaaataatcctgttaatattttagttacattggatccttttggtgaagaaggtttaattttacaaaccttaagatacattgatccaattaaatatcaagatttacaaaggaaatcattattaactattaaatcaaaacaaaatcaaagagtcattggtaaagttgagcaaaaacattttattgatgaaattgataaattaagatcttctcaaaaagctttgaaattgaaaattcaatcacttgaaaatacccttttggaaaatgaaaataaactaagaaatgaattgtataaggaacatgaaaagaatgtattgcaaattaccttggactataaaaaggaaattgatgagctttcaaatcaagctatctccgtaactgataagaaacttcaagatcaatcagactcttttatggttaaaattaatggtttaaataaaattttaacagagagagaaaaggagttagaagaatctttattaaatttaacaaagacaaactctcaacttgaagaattgaaacatcaatattctcaattacaagctttatatgatgaattaaaatctaatgattctaaaacaattgaaaaaatatcaactcaacttgaagaatcattaggttagaaatgaatccttgaaaatggaaattgaaatgctcaatcttaaatattcagatattaaatcaaataatgatactgctcttaaacaattagaagacgaaaaatcggttataattaaccgattaaaggatgatttaaataagtcaactggaaaggtttctcaattaaataatgatttgttaatattacaagaaaaatttcaaaataaagaaaattcaaatgaagatttaaataactctattgaattattgaaagaatccatcagagtaggcgaatcaaaacttcaagaaaaagaaacgattattaaaaatatgcaagaattatctaaatctatgaaagatcaaaatgatgagatactcaaattaaaagagaatgaaatttgtaaacttgaaagtgaaattaatgaggtgaaggcaagatctgataaagaaattggttctcttaaatacaaactagaagaaagagcaaatgaaatattacttttaaaaaatgatgaatctgctgtacaaaatctcaaagaagagttattgaacaaaaccaatgaatataaaacactatgttcccaaatggaaaaactaaagaaaactcacgatgaagagctaaaatcaattgacgaatcctttaacttaaaaaatgatgaaatattattactcaaaaaacaaaatactgataacgaagctatcttcaaaactcaaatcaacagtaaaaatattgaatttgtaaacttgaaagcagagttagaagcaaaaactagtgaacttgagaataatagttcaaaacttagtgatttgaatgttgaagtagaaaagttaaagtcaaattatgatgaattattaaagagtaaagatgatatcgaaactaaattaaaagaagaaataagtgcttttaaattattacttgataaacaaatcttaaagaataaaacattaaaatataaaatacaagaaataaatgataaaaaggaaattgaatctgagactgatagtgctgaaaagaagaagttgaacgatgtattacttgatttggagactaaattgaaacgtaaagatgatgaggtggaatcaataattcaaagtaaaaaatctgttgaagaagaattagcgagattacaaatggtctgttctgatttgaaagatgaagtatctgataaagctaaatttttagaaaaatacaatagtttgaaaaataaaaatatcttgttgaaagatcaagtaacttccttggaaactaacaatgttaaaattgaggaagaactccaaacttccaaaaccgaaattcaaatgttgaagaatagaatcagtgctattgaaaaacgtgaacttgaatcccttaaatcacacacaaatgataacttaagtgaagcgttgtctcaatctcttacatctagtcaaccagtcaatagaacaccaagaaaatcattaaacttgttgaacacagacccattggatgatattggattaccacctatattgtcatctccaataaaatcatcttcatttaatattcataatgataatgttcatgagaaggataatacgattgatataggtgcagctcaacgtaagaaaactaagaataagataagtaaaagggaccaaattttacaacaaaaggaaaatcatgaaaatgatatggaaagtaaatttgaaacaccaaaatctaacaaaaaaatgtacagggcattagttaacacaaaattatctgaacttaataaaaagtcatctctttcagtaagtccaaaattagatgcaaaggcaaagaaaagaaaatcatcatctccgctgaaacctggaaagaagaaagtaaggaatagtgtagctaatgaagattctttagaattactggaataagccatacattatagagaagctttatttataattttataatgatatttaaaatatacttgacggttgattgattcctcatctactgttgtccaacagatataagagatcatacaaagttcaatatataaaagtttaacttggtatattgaggtgttgagataactgctcgcttgtagttgcactttttatttctaatcgtttctttactaatgtttctttctttcagtataataggcttatcaacacactatacaggggtaagtctgcgtattgaactctatagggtacataagatataggaattatgactgaaacgaaagtcactaaaaacaactcatcaacaaacacttcaattaaaaataatagacctaaaaagcgtaattttttaggatgtttaacatgccggaaacgtaaagttaaatgtgacggaagacgtcctaaatgtttaagatgtgaaaagtctaataaaccatgtgaaggttttgatttcaaattaaaatttagtgagattttaacaatacagaatggaaaagtgtttagtttgaaaatagatatggaaaagaatgaatataaacgacaacaattaccattaatgaaaatgcctccatcttgttattatggtacttttaaggaacttgatttcaagataaatgaagttgattcattgatacatgatgagaacagtaagtataattttgatttaggtccatttacagttttcactaatgaaactatgtttacaaaatataagaaatctaagagaaaaccaattgttccacttaatcctccaaaaattccaattaatgtaaataataatcacatggatgtaatgaaaaagacaggcagtaatattaatacaaacaggaccaataatttaccatccatatcatcaataatgaatatgaatcattctgtggagatgaatacttctacaactgcatatttacaatcgaatccaaaaattttacccttaccgccagcattagaaatgaattatcaaagaaaaaaacagcaaacgcaacgtgatcttataaataagttgggtaataatgcaaataattatatagaatatgatggaacacatagaattatggataatgttgaatctaatcccatttggatacatccaagacttgaaattgatgcaattcttacatatcaagcactagtaggctctgctgatgttgttacacaatcttgggacataattaagggagttatatttgctgataaatatggtatgacttcaaggttgcaaaatagaattgttgataaaatgtatgatgattccactgataacgacgagcatatgaaagaatgtattaatcatgtgtttagagctttaactgaatctgatcatactttagtctctgcaccttcgtttacagctttgctaagatcacaaagagtacaagaattaatcagattatttgtcaagtcacagaccagtgtgatgattttgaattttaatggatctatattcgatacagttgttattccttcattatacaaaattgtaggcgaactgatggtctttgattgctctgtgggattgccaggtgattggtctgggaaagtctctgaaaatggaattgagtttaggcattattgtgatttactaaagagaacttattgtatggtggttttagcaattactgctttctctcaatacaaaaaattatttaatgaatatggtatttatgatggatctctaaagcttttcaaatgttatatttcctttagagagatgtctctgattaatttgtccataattataaaacctctactactgaagggagtaactaatcccgtaaaaattgataacgtatatttgcttaacagattatttaaagctggattatttaaagaactgatactcacgttaattcttgcgatatatcaagattcaaatttggatattattaataattatagattgatctacaatgtcttggatggtataaaagaacagtatattttaatgaaaatatcagataagcaaattgatgagatttggctttggttcaggtatatccaggtgttttataaatcatgctccaaaattgatctcgataattataaaattgatgaggaaggttttgaggatgtcagttcgaattacaatctaatagaaaattttgaatttaatgactattttgacaagagtgaatacaataaaatagaaatagccccaaactctatgacatctaagcaagataatacaaaagaatctgaagatgatgatgtaggagacagtgatagtgataataatgatatctcatattccagtgattcaactgatgccgaagattttgatatacaaataccgaaaagattgacaaaaagaccgtgtatcgaagatagacctcccaaatcatttactgtgcgttttcattttgatgaaaatgctaaaaataaaaataaacccggaaatatagaggaaagggatagtgaacaagaagattgcaatgatgaaaatggctcaaatgagatgaaatctttaaaagaaactaataagtttggcaagtataatatcaagtgcaaaaattctggaagtaaaaaagtgaatccccttacagggttatcaagtgaatcaaacaatatgacctttgatgaaagagaaagattttttagagaggattataaggtgcatattccgaatccatctaacttggcatctgacatgaaaccgaacaaattttcaagtgtttcaattgttgaaattagttttggaatcccactatccttgttggaacttatagaaaaaacagtcagattagcagatcataaaaattggtgtttaagaaaaaaaatattcccaagaaactttccaaagttctgctgtgatttagaggaggagttaattaactggaaaactgactgggatttgtacacggttgatacaaataataccgaaatattacaattccactcgttatttcacaaagcattatatcatttaactgttgccttttacaacactacccttttgttcttttttcgactaatcaaagaaatagaccccaatttacttcaaaatcatgttgtatctactataacacatttagaacaacttaaaaatctctcattgaggagtgatttcttgaaagatatgaaaatatttccacctttttggtgttttttcatttccggctccaatgcaatcagttccgaacttcagtatcgatttgatgaattagcaagaaaatggtttgttgcaggaaacaaatggataggaaaacaaataatgatggaggtttggagagttggtaatgaactaagtaacaacagtaaatctggtgatgcagtatcttggttagatctgatcaaagattgggaagtatcgggttttcattaaaagtaatgatttgattaattaaattttttttagagattcatttttttctaaatgtaatgtgaatttatccttggcagtttaaaaactaaatgagccatcttttcataattaagcaaaagcacgcatgcatattatgatttcaaaatatcataaaatcaaaaaatgaaggaagcgaggttcgaactcgcgcggacaatcgcccaacagatcttaagtctgccgccttagaccactcggccatccctcctatacttgttttgtaaagtattaggaggatattgtagatagtgtacgtaaaatattacgtaatcaaataattaatacttatgttgaatcttttcaatacaataaagaataataactgtaactaattgtacttaatactactatgcgaatactgtcgatggaactggtatgcgagtagttagttaagataaagttagataataagttatccaaaacttgttctatctaaaaccaactctcatatattgagatgtcccgctcaagagagcttatacatgttatttatatagtatttagaactgtaattaattatctcacaagccagcccgattctccatgtggggaatctattattcagttcttagttgtaatataatgtgactaaatcaattagtggagaagttgtatataataaattaattaatgatcctatcccatcatttttcataaccgttgattttctgtcaacattggtttattaaattattcatcatatttcttcattaaatcttatttcatttaatctctttgattatcattattattaaagtctatccttgagactataccacttgtaatgtctctattgattataatatagatattcactttatatcactaataagcttcatattacttacatttttcttttgagttagacatttttgtgttaattaattgttgtttacgtaatttttcaatttagatttagttcagtatatgaagatatattgaattgatgaagcataaataatatatgcgtataagtaaccaatctttataaaattgaatattttaatgaaaggagtgtaaaaaaaatccttttttgcacaattaattgtagctaagctgcaaagaatgttatctggtaatttgatgggaaaccacaggcaaaacttaagtgcaacaactttttgataaacgaaattaacaataaaaacttgtgcttctatcaatacaacattttaccgtcgttgagaccttactgatgtagataaatatgtcttctttaattcccatgtatactgctctcttctaagttctttaatggaagattacagttacgtggccagctcagatctttcgcttcaagaattggaaatgactgaacacatagcttccaccatcaacgagtactaaacaattaccatacacagtaatattctaaacacaaaactagacattcgttccaccaataacaaaacaacttctacatcctgaatatcatgtaccaagccctaaatcattcatattgatttggtggaacaaagataataaataattaagttattgaaagttctagttaaaatacatgtgtttgattgaaagacctaaaaagttacaataggtaaataattattttaaatatataatataatatatttacatgtatatataatatatagtatcataaaggtaaataaacaatcaccactatcgaaatcaatagagtgaaaaaggtatctgaaattttattataaggctaacaacaacattgctaatcccaagaaagcttggttaacgtttgttgacgccgctgcaccgctgtattcatctgaaactgatggtgttgtagttggttttgcggatgtagaaagagttgattgtgaatatggtacttcaacaatagtcatagttgtaaatactggaatgtaatctgaattaattgcactagttgtaaggagtgtggtggttgtatatgatccagtccaaaattgtgtagcaggttcaggttgagcaacatatatatcagtacttgttatgatatttctgttagttccagtagtagtccatgtcattgttctggaaattgttgatgatccagtccaaccatatgtatgggtaactttagacatgtcattatcttctgagttggtgttagttgcagtgttggtgttgttacctttaccattgttattaccgttgccattaccattggtgttagttgcagtgttggtgttattaccattaccattgttattaccattgtcattaccattggtgttagttgcagtgttggtgttattaccattaccattgttattaccgttgccattaccattggtgttagttgcagtgttggtgttgttaccattaccattgttattaccgttgccattaccattggtgttagttgcagtgttggtgttattaccattaccattgttattaccattgtcattaccattggtgttagttgcagtgttggtgttgttacctttaccattgttattaccgttgccattaccattggtgttagttgcagtgttggtgttattaccattaccattgttattaccgttgccattaccattggtgttagttgcagtgttggtgttattaccattaccattgttattaccgttgccattaccattggtgttagttgcagtgttggtgttattaccattaccattgttattaccattgtcattaccattggtgttagttgcagtgttggtgttgttacctttaccattgttattaccgttgccattatcagtggtgttagttgcagtgttggtgttattaccattaccattgttattaccgttgccattaccattggtgttagttgcagtgttggtgttgttacctttaccattgttattaccattggtgttaccattggtgttgctgtgggtggtggtgttagaagtattagtgttggtgttggtgttggtgttggtatcagtactagaagtatgggtgttggtatcagtactagaagtattggtgttggtgttagaagtattggtgttggtgttagaagtattggtgttggtgttagaagtattggtgttggtatcagtactagaagtattggtgttggtgttagaagtattggtgttggtatcagtactagaagtattggtgttggtgttagaagtattggtgttggtgttagaagtattggtgttggtatcagtactagaagtattggtgttggtgttggtgttagaagtattggtgttggtatcagtactagaagtattggtgttggtgttagaagtattggtgttggtgttggtgttagaagtattggtgttggtatcagtactagaagtattggtgttggtgttggtgttggtgttagaagtattggtgttggtatcagtactagaagtattggtgttggtgttggtgttagaagtattggtgttggtgttggtgttagaagtactggtgttggtgttggtgttggtatcagtactagaagtattggtgttggtgttggtgttagaagtattggtgttggtatcagtactagaagtattggtgttggtgttggtgttagaagtattggtgttggtgttggtgttggtgttagaagtgttggtgttggtatcagtactagaagtattggtgttggtgttggtgttagaagtattggtgttggtatcagtactagaagtattggtgttggtgttggtgttggtgttagaagtgttggtgttggtgttggtgttggtatcagtactagaagtattggtgttggtgttagaagtattggtgttggtatcagtactagaagtattggtgttggtgttagaagtattggtgttggtatcagtactagaagtattggtgttggtgttagaagtattggtgttggtgttggtgttagaagtattggtgttggtatcagtactagaagtattggtgttggtgttggtgttagaagtattggtgttggtatcagtactagaagtattggtgttggtgttggtgttggtgttggtgttggtgttagaagtattggtgttggtatcagtactagaagtattggtgttggtgttggtgttagaagtattggtgttggtatcagtactagaagtattggtgttggtgttggtgttagaagtactggtgttggtgttggtgttagaagtgttggtgttggtatcagtactagaagtattggtgttggtgttggtgttggtgttagaagtgttggtgttggtgttagaagtattggtgttggtgttggtgttagaagtactggtgttggtgttggtgttagaagtattggtgttggtatcagtactagaagtattggtgttggtgttagaagtattggtgttggtgttggtgttagaagtattggtgttggtgttggtgttagaagtgttggtgttggtatcagtactagaagtattggtgttggtgttggtgttagaagtattggtgttggtatcagtactagaagtattggtgttggtgttggtgttggtgttagaagtgttggtgttggtgttagaagtactggtgttggtgttggtgttggtatcagtactagaagtattggtgttggtgttagaagtattggtgttggtatcagtactagaagtattggtgttggtgttggtgttggtgttggtgttggtgttagaagtattggtgttggtatcagtactagaagtattggtgttggtgttggtgttagaagtattggtgttggtatcagtactagaagtattggtgttggtgttggtgttagaagtattggtgttggtatcagtactagaagtattggtgttggtatcagtactagaagtattggtgttggtgttggtgttagaagtattggtgttggtgttagaagtattggtgttggtatcagtactagaagtattggtgttggtgttggtgttagaagtattggtgttggtatcagtactagaagtattggtgttggtgttggtgttagaagtattggtgttggtgttggtgttagaagtattggtgttggtatcagtactagaagtattggtgttggtgttagaagtattggtgttggtatcagtactagaagtattggtgttggtgttggtgttagaagtactggtgttggtgttggtgttggtatcagtactagaagtattggtgttggtgttagaagtattggtgttggtatcagtactagaagtattggtgttggtgttggtgttggtgttggtattggtgttagttgttgaagagctatcaacggaaatatatggacactgggtatcttcaacatcgctaattgaataaatccaagttgaccaatcttcgtccaacatagtaccggatggcgtaataacagaaatatcaagagttgatccaagaaggatgttcactaaaacaactctcattggataatattttccagcttcgaaatgaacaaatgcggtgacatctttaccgacagtatagataagagcaccattttcagaattgtatggaatgacatctggttgacagcaagaaaatgcatcatcgttaccaaaccaaatcattgcaccgtcgttaacattcttaattgtaaaagcgtaaataccatcttcttgtgcataaaagtaaccagttaattggttgacataacctaaacctgcatcaatcttaacatcatcataaattgtttggaaaccagcaccaatagaatagtttggatcagtaatgtaatgtgctgtaccaataactctttgttgggtgtaactgtttgcaaaatattggctatcgtataaattaaaagcttgataatcatagaaagttgcatgaaaaccatttgtagttgataaatgcgcaatatccaacaagcatccagttgcacttgacttaccagtaacatgattttcaaatggtgtagcagaggtagtcgatgtatccgtctctgaattaatatttgtaggggttgagcctgtaacttgattaacaaataactcaactggaacaacgttgttgtcaacagtaaccaattctgtagtcgtatattgagttgatttttcaccagtgattgtggtagatctagttgatgtaggatctggaagatataagttttcaacaaaataggttgattgaccaccgggaacattctggacaacttcggcaaattcagttgatgcagttgatgcgccaaatgaaactgaagttgagacagaaattgaattggcgcctctaacagtagcacaagcttgaatattagatttatcaaaattaacaacattttcaaaagtatcaaagacataacctgttggatcaatgacttgaaattccataacagctgcattttgaacattaacataaacaactctaattggatagtaattctccgcttcaagataaacaaaagaagaatgagcaccattatctctgacacctaataaaacatcagaataagttgaatccatgccagtttgagtacaagagtcaaaagcaccctcaccgatccaaataaaaccaccatcatttagatagttaacggaaactctatgaataccagaatttttagctataagtgaaaaatagataaatgttagtatattgatcagaaagattggatagaataacgaatcaaaaaaaattgaaactaatacatacgtttaaaataacctttcaactcaatcaaaacgttgaacatatcaatattgtataaaccataaacttgctcgttaagcatattggaatcaaaactaaagtttggatcagtaataccattggcactagtaataatttgtctagttgaataaccatcagcaacaaaatcatcattccaaaatggaatgaagtcaagagcaggataactgtagaattttgcattaaatcctgtttctgttgcagcagtatcttttaattcgattgaagcaccaagtccattggcagtagtagaccaaacgttacgtctggctgagattgtttgaaaaagtgacagtaatatagctgcactaaaggcaaagttggaaaacatagtgagtgacaaacttgctttttgtaaaaataaatgtatgaaataatttttgttaaatcaattcaaatattctttaactactgtaagtttgagaaggaattcgttctatttatacagatgatatctttatgatattcaagataatgaatacaaaatctttctaacaacaatgtaatattcggcaaaaagctcattaaatctgtctttaattatacgaattgtaaactttcagctcaaaaatgtaaataatgatggaaaccttttgtaaaaccgtgttcttgaatatttgagctcgaaaagtagatattaggaattattgttaaggtttaaattgtatacaaaatatgaaatctcggtaaagagcattaaataataatcaactaaaaaaatagtgtatctcgattcaaaaaataatatttctttgtaaaaaataaccgttggaataataaattaatgcaaataaaaacgtgtatatcctgagcctgggggagccctttagttacagatctattttttcctaaaataaattatttatgtccgcactttgttcggtaatatgcaacctgaattatcctaaattattggtaatgaatactacattgaacttttattaaacaagagacttttgtatagtttacatatttccaataaatcataatatcagggacagtcttcaagaagaatctaattatttatttaaaatacatattttaatatgtgttccatcataaaatgtttattctgtccgttaaggggaaaacgggaacgttcctagaaagtggtctgtctttacagttattttattgaagctttattatttaaatagaaaaacctttatggctaatattattttcaactccattaataagttggagaatttggcaagaatatttgcacaatgaaaccgaaaattattgaatcgatgccttaagaaaaatctttttagctttattatcatacttacaaccttaattatcactaaaaattatttttttgccgaggcagtacaagtctttttttcttggccccaaaatccagagagttcataattattgacagtttcatcaattatcaggggttaacgttttactcgtatgatactcaagctgccccatttatttattattatttaaatctattattatttttatcatgacacatatgcaaaatactatacattaataatttacagtaatacaggattaaaacaaaaacagcaggtgtatgcttgtctatatgtaactaaggttttgaaggtataaatttgaaattgaaagctgaatcttgaactgtatatacgaccatataacttaatttgcaaagcaaaaaacttaaatttctcacaaaatttaaagtttcttttcatgtcagatttgaaagatttccaggaatttcaaaagtttcgagaaatattattacaattcaatgaagaattcctaacgacgataaatgttaattatgtagcattaatatttttaaataagcgggttttcttgcgttgtaaagtttattattatgtcataatcagatcaactaccaaaattctcaaaggaatactacatcaattttctgtaaatgcctgttattttttgttaaataattttattataaaattatactttgtaaccttgaaaaaaaaaggactataataggtttgatttgtataaaatttgaatccagaacttggaagttgtatatttttacatttctatagtaaatgataaataatcagctaggttgtgttttaataatttttttagattattgtaccatcaaaattatatatatatatatatattagatgaatgagactaactagtaatattcagtaaccaaatgtatgttggtttagtccgctgtaactttatttatagccaccggcgatgattctttagttcccagtaaacttcccccgcgcttaataaaaatactggggattcaaaatttttacgggtagttgaaaatgaagttacaacggacttaactaagatacattcgatttttacatattactagttagtctcatttgattaaaaagactgtatatatatattttaggaaaaacagtaactagttggttagcacagtgactagaaattttacaattgaaagctcaaaagtcttatcaatgtacattacaaaatattttatcttggtttttgtgtttatagtatattagtcattgatctttgcatttttaacttgtagctatcttatataacaaaagatttagataaaattgacctttttggtgtagttaaaagtctaaactagtgattctaccaaataaatattttttttcaataatttgaatacagctttttattactactaaaacgatactgtattaatgtaatagttaaatgaacacttattttattatcaacctgatatatcaatctaggttaatgactaaaacaagagtctattaaaacatatatatgaaccaaggcgtaaaataaatactaactaaaaatagaagcattaataaatataagatgtgctcatcaatgattcaagattgtcaaccacaaaatccaatgaaaacaaagctgagtcacttttgaaatttgaaactttgtttatcacaacaattagtttaaatcttcaatttcacaatcattatttttgacctttagctaatctctacatgattcatttccgatattccaatttcaataatactattttgtgaactacacaaacagtaaggtaaactcaatcaaaattgattctttaaggggtcttatctatgtagtatcactaaggatagatgtaaataattaaaaaatgctttgttgataaatttaactgtttgattcttctttattttgaattgttatttatctaactttgatcaaatggtaaatttaaattaattatttttatattaccaataacaacaggtagaaaaaaattcttgtacatttttgaatttttcaacagatgtttaaaatatttgaaaaattaaaaatcacgtgaccttaaaaaattagtgacgaaaataaccagcaaaattaacatgtaataattggttgtatagtgtagtggttatcactcttggttttgatccgggcaaccccagttcgaatccgggtacgacctaacatttattattttttttgaatttttgttttcatatataggggcacactttaaattttcccttacaaataatttttttttatcttaattcatttgcattattcaagaaccttcttctttttgtgacaattaaattacaattacataaatgggtaaaatcaatcaaccaaactcacaaattagactaactaatgtttcccttgtgcgaatgaaaaagggtaagaaaagatttgaaattgcatgttatcaaaataaagttcatgatttccaatcaggagttgaaaaaaatattgatgaagttttacaaattcctcaaatttttcttaatgtttccaagggtcaaattgcatcaagtgaagatttgaaagcatcatttaatacaacaaatattgatgaaattatacttgaaattttgaagaagggtgaaattcaattaagtgagaaggagagagctcaacaaaatgaaaaattacataaagaaattctaaatataatatcagctaaatgtatcaatccaaagagtaagaaaagatatccaccaacaatgattgataaagctcttaaagaattaaaatttaattttgttaatgcaagaagtgcaaaatcaaaatcattggaagctattaaattattagttgaaaagcaaatcataccaattgcaagagctaaattaagggttaaagttatattaaatacggaaacttttaataaagttaaatcagaatttgagaatgaattcatttcatttcttgaaaatagtgaaattgttgatgataatacacaaattttatttttattagaacctgagaattataaaccattaggtgaaaaggttaaatcaatgaaaggtaagctagagttagttgattcagcagttattcaagaaggtgaaatcaagttataatttaatttttagtgcaatgtgtgggaaaattattttttttctcgaggtatagtaagtaattaaatttagttgtatcattatcattattatcaatgtatagaaatgtaaaagttttaatagaacttacttcatcattacgtttgtatagattcaagtgtagaaaaaatttattatgtctaatacaggagaatttagcaatacagttaaggaatctaacttaattattaaacaacaagatggtaatgaaaaaattttgacatgtacaattcttgaatttcaagataaaatcataataaatttatcattagatggagagacagatatttcatatgatattcaaatacctcaacaaaatgaattcaaaaggccatatcaaatagatgatttaaataatgaagtagataatgaattagataatgatgatatttcatctacgagtacaattgttccaattgtattaattggagctggtaataacataaagacacaagttttagcttcacaaataggtaaagtaatgtcagaggaatctaataagaatattatattaaatataagtggacgaatttttggtaataaggatgatgaatttcatccaaatgacagcacagttgttaaacagtgtatacatattgtaactgatacttatattgcataatacacacgtataatatctatgtaataaagtaaagtaaaataaaataaagcatgcaatgcccatgccaataactacattaaatgtaaaaagacgcagagaataaatttcaaattatttactggttaatttatcatcatgaaaaaaattgactctttgaacttttcatctgttttaaactttttgcttgtttggttgtttgtttatcaggcttctgttatgtatagaaaagatcaaatggatagagatcttgacgctaaacttaaaactatgaaattatctgacaatcaaactaatgttgaagaaaatattcaacaaggtgaaggagttgaagaattatctaatccaaaacctcaaagagaaccatggtataaaaaactttctggtgttccattaaatactagacctgcatctccttatacattaaatcctccaattgattctgatggtttatcatggccaagtttaggtgcacgtgaacgtttagaatccaacaatgaagaatcattaggtagagaagctagaattgccaatgcagttagaactattttaacagaattaggtgaagatactaatagagaaggtttattagaaactcctgaacgttatgcaagagcaatgatatttttcactaaaggttatgaagataatattaaagatgttattaaaagagcagtttttgaagaagatcatgatgaaatggttattgttaaagatatagaaatttattcattatgtgaacaccatttagttccattttttggtaaatgtcatattgcatatattccaaataagaaggttttaggtttaagtaaattagctagattagctgaaatgtatgcaagaagatttcaagttcaagagagattaacaaaacaaattgcgattgcattaagtgaaattttacaaccaagaggtgttgcagttgtcattgaagcaacccatatgtgtatggtaagtagaggtgttcaaaaatcaggtgcaattacatcaacaagttgtatgttaggatgttttagatcacaacaaaagacaagagatgaatttttaacattactgggaagaaattagtttaattttatattatttcttcacttttacatttaattcttttctatttcaacaaatttcagtttttatatacttacaaaatatacagtacaatatttacaattaattttataattcaacttatatacaatataataaaaatataattaaattaaattactattactattactattactatcaagatataagaattattatttctttttagattttgtaacacttgaacctattgtaatattcacttttggaggaactgtaaaaccaaaagatttaccaactttaactaaatctaatttatcaactttataaacagttttcaaatgatgagatgcataagcttgtaaataagctctatagccatcttttgcagattgatgtaaccaaaaattattttttatcaattgttctaattgtgattgaacatttgcaattttatctattgggaattcatattcatttaatggaactttagcagcttttaaatatcttaaaaatcctaattcttgaggaattaaaaacattaatgatttacccttacctgaactacctcttgcagttctaccaactctatgaatataatctcttggatcatcaggtggatcaaattgtaaaatccaatcaacttcaggtatatctaaacctcttgctgcaacatcagtacataataaaataccttgagttgcattacaaaattcaaaaaatgttgaagttctcttttgttgcttttgtttaccatgtaaatctaatactggtatatcaatataatttaataaagctgaataatatttaacacaattacaggatgaaaagaaaacaattattttctttttctttttcaaatttcttttcaaaaatgaaaataataataaaaatcttttatctgaatcacaaaccacataaccttgttctaaaccttcagcagttgaaaaatctctatcttcatgaacatttatataaacaggtcttctctttaatgaagctctagctaaatcttcaactttagtagtttgagttgcagagaataacattgattgtctatcttcatttggtaaaattttaacaatttgtttcatttcatcttcaaaaccaatttctaaaattctatcagcttcatccataattaaagttttcaaatttttgaaaacaaaaccttttgtattttgtaaatgatctaataatctaccaggagttgcaattaataaattaacacctttcattaatttttcagcttcttgtcttctatttgcaccaccaattacaatacctaaagtttgtgaatgattttccattaattctctagcaacaccaaaaatttgtaaagctaattctcttgttggagttataacaattgcaccagtaccatttcttggtttaaatttaagtgaatataataattcaattgcgggtattaagaaagctaaagttttacctgaaccagttttagctgcacctaaaacatctttaccagctaaaagaggtggaattgtacgagattgaacttcagtcattttagtgaaacccattttttgaattgatttaagagttggagcagataatgctaaatcagtaaaattttgaggaatttcagtaagtggagtattatctggtattttttcatccaaagtatttgtattatcattattttcttcatcttcatcttctactacttcatcttgttcctcttcatcatcatcatcatcttcatcatcatcattatcgtcagctttttctaataaatctgcaacatcaccatattcattatccaaatcgtcgacaattttatcagtattatcatcatcattactattattatcatcatgactatcttcttccttttgattatcttttatttgctttctagcatctaaagtaattttatttgaagatttagttaatttatcagatttttttgaaacagcctttgaatctttcttttgtttcttcaaagaaacatcatctgaaccaacagccgatctcttagaaccagtctttgccattgtttaaagcagttactataagatcagaacagagattaaaaaaaatttcagtagtaaaaaaataaaatttttaaaaaaattaaataatttaaagctcccacagaaaaaaaaataaaatttcctaaaacagcaaggcggcgcgtcgaaggggaaaaagagtgaaaaagagtgaaaaagtcattggaattaaaattgtccctaaggttgtccataatataatggaaagaaaaatattattgttgtaatggaatagaatagaatagaatagaatagaatacttttctgttttctgttttcttaattttaattttaattttaattttaattttatttttaatttctagttttcttttatcttttgtcttctctctttataatatcaattactattataaaaaacatagttgaaagataattgataatgtcatctgttgctaaagaatttagattagtagtcgttggaccaccagttgttggtaaatctgctttaacaatcagattaactcaaagtgaatttgcaaatgaatatgatccaacaatcgaagattcttatagatattattgtaatattgataatactcctgcttctttggatattttagatactgcaggtcaagaagaatattcttcaatgagagatttatatatgaaaactggtgaaggtttccttttagttttttcattaactgatcgtcatacatttgaagaaatttcaactttttataatcaaattattagagttaaaggtgaaactgtacaatttgtgcccatgatgttagttggtaataaaaatgatttaattgatgaaagacaagtatctcatgaagaagcaattttattagctaaaaaatttaattgtgcttatattgaaacttctgctaaaactggtttaaatgttgttgaagcatttcatggtttagttaaaatggttatgtatggtgatttaatgggtattggattagaaaatactttatatccaaataaaatggaagaattaaaagctcaagaatcaaagaaaaaattaattgaacaaaattcaaaaaatgagatgaatactagggataatactaatattaataataataataataataataataagaattttaattcatcctttaatggaaacaatactacaaatactactgataatcaaaataacactaatactattaacaataacaataatacttcatcaaatgtgataaattctgataataataattcaaaagagaataataataaacaatatgttcaaaacacttcttcaaaaccaagcgctggcgcaaaggaaaatggtggtggttgttgtactattatgtaattataattatattatattaaatacaccttatcaaccaatatcaatcaaatctatctaatcaaatatatatctaatcaaatttataaccattatatatataataacctactatataattaatctctatttactatactatcttacattctaatttgcagctagtgaaagtatcatgttaaaaatgcactatgcatgtcccatctaataagttttgataattgaatttatttattaaataagaattgtgaaaaaaaatatatttaaaatagttataaagtaataaagtaatatcatttataaataagaaataagggagaatttgggataaaaaaagaagaatttatctttatcatataattataattataacttctctggagcatcaactttttctctagtgaaaacatctgcttccttagttgcattaattgcatcttgttttaattgttcacctaatgcattaaaatcaacttcactttcattaattgattgattaacttttttaatatttgaagattcatcaataatatttgatgaagtagtagttgatttagttgatgaagattcaataattggttcattaacagttgaacctgcagttctaattggtaatttagattcaattaatttaataagtggagtaattttcttctttgcagcatcaatatgaggaccataagattcattaattgaatttgataatttattaaatttaacttttaataattcaaataaatctaaaattgttttatcaataatttctttatttaataaataaatttttggtgcagtaaatgaaataattgttgaaatgaagcataaagtccaaattgagaaaatatttgtaattttataaattaaatatgataaaacacctgatttaatagtattttcaatattaactgaagtatataaatttttaatattaatttcaaatttttttaaaattgtaactgcatgtggagcataaaattcagcaaaatctccaataaaatttttattattaaattttggataagatgatttaattttagtaattaaacctgtaccagtaattgatttacctaaatattctgctaaacctgaaaataataagataaaagttgataaacggaaaaataatgctaataaattaacatatttaattaataataatgatgataaaattgatgataaaacaattgcagattttttaggattttcccaagttaataaattacaactatttttagttaaacaagcaccaccacaacatttatttgaagaattagaagatttacaagatgacattgttcttaatataatcaattgagttaataaaagaagaagagataaagaaataaataaaagaaaccactataaggagtaagttaaatcaacacttccacaatctactaccaccaccaccatcgcttattctattaatctttaaagtcaggcgaggtttaaattttttaatctttctattactaatttttcacgacatgttttttgtgatgtgtgttttataggagagtggacagtggacaattatcatgatgatgaagaagatgatgatgatgatgagaggattatcgtttagaagatggtatagtagtgtgggagtggatagtaggttctttaaaaccaccactatagagggttacactcaagttatgcctaaggaaaatgatgaaattataatttcaatgtcttcaggtgttgattcatctgttactgctttaatgtttgctaaaaaatataagaatgtacgtggtatatttatggcaaattggtcctctgataaaattataaattcaaatagtaaatgtactgttgatgatgattggttacaagttatagaaacttgtaaacaattaaatataccttgtgaaagagttaattttgaaaaagattattggactcaagttttcgaaccaatgttagatcaatatcaacgagggttaacaccaaatcctgatattggttgtaataaatatgttaaatttggtaaaatgattgaatatttaaataaaaaattcaataattgtaatatgaatatgaataatgataaaaaatggtggttagttacaggtcattatagtagaatacttcaaaataatgaaacaaaagaatttaatttatttagagctgattataaatgtaaagatcaaagttattatcttacaagtatgccaaataatatacttaatcatgttttaatgccaattggacattatagtaaacctgaaatcagagaaattgctaaagattataatttaattacaaaggataaacctgattctcaaggactttgctttgtttcacaaattgggaaatttaaagattttcttaatgaatttttaccaccaaatcctggtaatatagttacaaaagatggtaaaatttggggtaaacataatggattatggagtgcaacaattggacaaaaatcaggtatttcaatgcctcaaggtaatccattatataaaggagtttggttagtcagtggtaaaaatattgaaaaaaatgaattaataatttctaggaaagatgataaagatgcattttatacaaatttaattaatgttgatgaaaaaaattggtattggatgcaaaaaggtttatcatttgaaaaattacttattgataaatataataataaaaataataataatattaattgtcaaataagatcattacaggaacctaataaagttttagatattaaagtaaatgataataataatggtaaagtaagttttaaaataaatgaatcaattttcggtgttgcaccaggtcaaactttggccttgtataaagatgatatgttactcggatcaggagttattgtataggaacctttttttatagaacattatagactataatatacagtatcaaccaccaccctctgacagttttacagaattttttacaagactcctgttgaaatacgcattatatatgataaaatgttaacttattatgtgatttcaaattacagaacacgctatttttgagactctgttttaattgtatgaaatacaatcaatttgtatgtaactttggtgaaaattgcgtttttgaagttctgttctctttttgttagtttttgatataacaatagactataattcacgagctattttacttcttaaaaccattctcttctgtacgagtaatgttaatcgttgtactatattattaaaatgatcgtatagtcttttaaatctctttaaataaatttctttatccacattttgactagtaagttgtttaataagtattaataaagaatctaataatggtgaacaatcatcaacaagtttttcagcttgtgcagtgattagtactaataatgttctattttccaatataatattcttttcattatctttatcattactgacttcatttgtatctgtagtaatactaatatcatcaatatgacattgattaagtaacttacagagatcatctacatgtgtagcaagaagtggatattttaataaaacgggattctccaattgatcagcagaaaacccactccaaatctgttccaacacagagacacgagttttcaataacgacaacccattgctacatctactatcactactcattgtcctatttaataataataatacttatatcagataaagccaactatctcatttcattttctcagcgacgaagttgagtttttctgacagtggcaaaacatatagggattactgtattattttggagtttgtctgaccacccccacccttttcttcttttagttgtttcccttaatcaacaattaactcataatggtatgtatatgtatactatatacattggatgtctgtaactattaaaactgaataaatactaacatattatacccccattgaatcaacaatggctctaatgatgattgataatcaattcatttcatttcataatttgatgacatgtttgaaatcaatcaaattgatgttttattgaatgaatgattggttgacttatcaattatctcacatcctttattatatttgtacagtctagatctgggtatgttaataatcttatattttaaagatgaagtaaaccaataaaccccaataaagtgaattgaatttaagtcatactaacattaattaattattattaatcctttattattacagtgttgcaatttctgatgaagctttaaaagctttcaatgaccttaaattaggtaaaaaatataaatacgttatttacaaattaagtgatgataaaactcaaattgttgttgacaaaacatcaactaatgattcatatgatgcatttttagaagaattcccagaaaatgattgtaaatatgctgtttatgattttgaatatgaaattagtgcaggtgaaggtaaaagatctaaaattgtctttttccaatggtctcctgatactgcttcaattagagcaaagatggtttatgcatcttcaaaggatgctttaagaagagctcttaatggtgtctcaactgatattcaaggtacagatttctctgaagtttcttatgaatcagttttagaaaaagtttcaagaggtgcaggttctcattaatcttgcaatatactgtttgttgttttattgtataattactttattataacttgtattacatttatcgttactcttaaaatttattaaacatctattaaacatctagtactggtaagtcggtattttttcctaaaatgtgtatattttccccaacattaatttgttgataataaaattaataatcagatttttgtacgacctattgtgggaatatcacttaatattatggaaattttttatattcaattaacactcttttcttttttctaatctaatcttcaattgaacaatgtcagaagttgataccgatgttataattattggtgcaggtattgcaggtcttaatgccgcatctacattacactcaaaaggtttaaaatcattaatattagaagcaagaccaagaattggtggtcgtgtttatactaaacgtgatacagttactggtaatcattatgatttaggtgcatcatggtttcattcaacaatggaaaatccaatttttgataaatttacaattaattggtattcaaattcacaaattgaaagtgcaaaatatgatgataataatgttggtataattattaatagtgaaacaggttcattacctagtggtattaatgttggcgcaattgttgatgaaatgaaatattattcatcaaatttaaaggatgatatttcattgcataattgtgcaattgaatattttaaaactaaacaacatcgtttatcaagggatgaaattaaatactctaccgctttatttaaatttgctgaattattaaatggttgtgattgggatacaattggttctaaattttcttatggcccatttaatggtagagatgcatttaatactataggttatgataaagttattgaaaaaataattgaaggttaccctaatgataatattttattaaataaagttgttaaatcagttgaaaaaattcaagttggtaaggctgatgaaacaattattaaagttactaatgctgatggttcaatttacaaatcaaaatatttaattgttacaattccattaggtgttttaaaattatctgttgataaaactaatgaagaaggtgcaattacattcaatccaccattaccaaagccaattactgataatttcgcaaagactaaatttcttccacttgttaaagttattgttgaatttgataaagctttttggcctgataatgataaatttttagttctatcagtaccaaaggatgatgaattagatattactaaaacttatgaaactgttaaagagtttggtaattataccgataaggaacatgttaaagcatttgatttcccatgtttagtttctaattttaatactgttagaaaaattccagcattgatgtttttattaccatcacaaccagcatatcaaattgaaaatgcatcggatcctgaaaaatatggttatgacttaattaaaccaattatttctaaaattgttggtaaagatattgagattcctgaacctaaattaattcttacaacatcatggggtaatgatccatattcaagaggtgctatcagtacatgtgcaccaggtgataaattcgttaatgatgcattaattgatggatttggtagtattagatttgcaggtgaaggaccagtttatcaaggtcattcatgtgcacatggtgcatatataagtggtgaaagagaggctaattacatcattgagaagttatctaaataaaagtagtaaacaattacttatttgtaaatattttttaatgaattaaattaaaaatagtaatgatccgtgaatttaggccttttttgttgacatttcaataacaaggctggtttcatgaaattttagcaacgcatgggggagaaaatcagtcaatccttttcaaaattataggacttttacgtgttcttggttattgttcttctgtaatttactttcatttgctaagtactggggtatataaaacatcaacaacaaatgagtagtgttattagagataaatatgaaaaggcgggacaatctcatattttcaaatattgggaacaattagatcaaactcaacaaaataattttataaatcaattatctaaaataaatgatccacaatcatttataaatgatgtttctgatgcaatcgaatattcttctaatatttcaagtgctaaagagtatacaaaattacctgaaacatcattcaattcaacaattacatcatcaactgaacaattgttggaatgggaaagtaaaggtttagaattaatcaaaaatggtaaagttggtattattttaatggcaggtggtcaaggtacaagacttggatctacatcacctaagggatgttatgatgttggattaccatctcataaatcattatttcagattcaagtggaaagaattagaaaattagaattattagcaaatagagatgaaaataatcataacgtgttaacactctatattatgacatcaggccctacacgtaagaatactgaagatttttttgaagaaaataattattttggatggaatgaaaatcaaattgtatttttcaatcaaggtacattaccagctgttgatcttgaaggtaaaaaattattacttggagaagataaatgttcattagtcgagagtcctgatgggaatggtggattatataaagcactatatgataattcaatattagaagatttcaaatcaagagggatagaacatattcatatgtattgtattgataatattttagtaaaagttggagatccattatttattggatattcagcaattaataattttgatgttgcaactaaagttgttagaaaaaatgaaccaagtgagaaagttggattaattgtattagataaaaccaacaatgttccatgtgttattgaatatagtgaaatttctaaagaattagcagaatcaaaagattcaaatgatccaaaattattaaaattaagggctgcaaatattgtcaatcattattataaagttgaatttttagagaagatggttccagaatggattaattcaagaaattatttaccatatcatattgctaaaaagaagatatcatgtattgatactccaactaataaatttatacaacctacagaacctaatggaattaaaatggagcagttcatttttgatgtttttccaagtgttttattaaataagtttggatgtttagaagttgcaagagaggatgaatttagtccattaaagaatgcacctggatcaccaagtgattcaccagagatgtgtcgtatgaattgtctgaaaagaagtactaaatggatcatagcgaatggaggagaagttaaagagggtgctctcattgaagtatcgccattaaccagttattctggagagggattacacgatgtaaagggtaaagtatttgaagatggtagtattgtatagagtagaagaatagaatatataggatataatagagtaaattacgtaatataaatgggtatcaggagatgcgatagcgccggatgtcaaaatttaaattttcggagtggctgtatgtgaattgataacaataaattaattgattaatttgtatttaaatggatgggctgactattgattcctcttcaattctttataacttgttcttctttacctccctttagttttttttaaccaagaaagacattgttaatactctagtaatcatgatgccttcaattgactccaatgcctttgttagaggtaaacatagacgtacaatgactgggtttaccccaactgaaattaaaaatattgatgcttcaattcctgttaaatgtagaactgcgtgggcaaaacatgccacaactggttttactaatgaagaagaattagaggatagatttattaatcatgttgaaacaacacttgcaagatcaatgtataattgtgatgatttagctgcttatcaagctttatcaaatagtttacgtgataaattaattttacaatggaataaaactcaacaattatatacaattaaagaaacaaaacgtttatattatttatcattagaattcttaatgggtagagcattagataatgcaatgattaatttaaatgttaaagatttatgtaagaaaagtgttgatgaattaggttttaatttagaagatattattgaaagagaacctgatgcaggtttaggtaatggtggtttaggtagattagctgcatgttttattgattcattatcaactggtaattatcctggttggggttatggtttaagatataattatggtattttttcacaaaaaattattaatggttctcaagttgaacatcctgattattggcttaaatttggtaatccatgggaaattccaagattagaaataagaattccaattgatttttatggtacagtccaaacaacaattgatagtaaaactggtaaatcaaagaaagaatggttaggtggtgaaagagttttagcaattgcttatgatttcccaattccaggttttaaaacaaataatgttaataatttaagattatggtcatctcaaccaacaactgaatttgatttccaaaaatttaatgaaggtgattatgatgattcagttgctcaacaacaaagagctgaatcaattactgcagttttatatccaaatgataatttttatcaaggtaaagaattaagattaaaacaacaatatttttgggttgcagcaagtttacatgatattgttagaagatttttgaaaactgaacattcttgggataaatttcctgatttagttgcaattcaattaaatgatactcatccaactttagcagttgttgaacttcaaagaattttagttgataatgaaaatttagaatggtcttatgcatgggatattgttactaaaacttttggttatacaaatcatacagttatgcaagaagcattggaaaaatggccagttgatttaatcggtaatttattaccaagacatttagaaattatttatgatattaacttatttttcttacaaaaagttgaaaaattattcccaaatgatagagatttattaagaagggtctcaattgttgaggaatcaaccccaaaaaatattagaatggcaaatttagcaattgttggatctcatagagttaatggtgttgcagaattacattcagaattgattaaaacaacaatttttaaagattttgttaaaatttatggggctgaaaaattcacaaatgttacaaatggtgttacatttagaagatggttaaaacaagcaaatccaaatttaaccaatttaattagcgaaaaattaggtagtgatgattttttaacaaagccagtcttattaaagaaacttgaatcatttattaatgataaagagttcttatcaaaatgggatgaagttaaatttaacaataaagtaaaattatccaaattaattaaatcattaactaatattgatgttaatccacataatttatttgatattcaagttaagagaattcatgaatataaacgtcaacaaatgaatattttcggtattatttggagatatttacaaattaaggcaacaccaaaggaagaacgtgaagctaaatggttaccaaaagtttgtattattggtggtaaagcagcaccgggttattatgcagcaaagaagattattaaattagttaattctgttggtgaagttgttaataatgatccagaaattggagatttattaaaagttgttttcattccagattataatgtttccaaggctgaaattatttgtcctgcaagtgatatttctgaacatatttcaactgcaggtactgaagcatcaggtacatcaaatatgaaatttgttcttaatggtggtttaattattggtacagttgatggtgcaaatgttgaaattactagagaaattggtgaagataatattttcctttttggtaatttatcagaagatgttgaagatttaagatatgatcatcaaatgggtagaattgaaattcctgatgcattaacacttgttttcaatgaattatctaagggtacatttggagattatggtgaatatcaaggattaattgaatcaactaaagtccatggagattactatttagtttcagatgattttgaaagttatcttgaagcacaaagtacaattgataaagaatttaaagatcatgaaaattgggttaaaaagggagttttaagtgttgcaaatatgggatttttctcttctgatcgttgtattgaagaatatgctgaaaatatttggaatattgaaccaattattgaacaagtttgaaatttgtgacattgattggattttcataaagaatgtgttttttttttcatttttatacctacattattttatttcattttatctacaattatttctaatatttttattatttcctttatttctttcatttataatctagatttatagcacattctaattaaaccattattaataaaactatttacattgaatatgtgaattagtatgaagtgtttttctgaaagtattatacaattgagaatctataaaaatattgggtattgagagatgagacggttgttcttgttatacatgctttgaagttgtataatcaatactatttgagattgaatcaattaagtcagtatcccaatttgataatagaatttttcttaaccaagcattttcactttctaaagatcttattttacctttatatttattaattttattattttcagtagttatatcatattgtaatgatagagttttatccttatgagttgtcttaaatttatatgatgtatgagaagtatttgaaaatgttgaagaagttgaggaattacgacttctatttagtgaaaatgaattatttctgagatcaatagatgttgttaatggtgttgatgtagctgatgatggcatcaatatgtagtgagggttgtatatattaaggtaatgaatagattacagtaaataataagagctaaataagatatagttttaataaaaagcaagtacaaagcagatacaaatcaaaggatgttgattaataacattgtagtaaaatgaatcgggtattactaacgcattattatagccttttgattgaaaggatccaaataatgtaagattgggcactggtataagattacaataatataagattgattgaaacttgcacagttcaaactattaaaacagatctacaggataacctaaaagggaagttttgctctccactaaacggagattactttaaaattttgtggagtttgaaataataattttttttaattgtgcaatgtcacgtgagctgcctttttacgtgtcacgtgctttggaggctcatgcaagttattatgattatttttactgatggatttcttactacagtaggacagaagggttgcgttatatataatataatcgtatattatttattgttatcttttttcattaacattctgtatcatataataacaatgtctacagtaagattggtgtttgcaaatggtgagaaactcacttccaatgctaatacccttagagtttctggctatatatccaaattaattaataacctcgaggtaaatggtgataatagtgatagtgaaagtgatagtgacaatgagagtaagaataagaataaacatactgccaatggtaaaagtccaacaattgatatcccacttgataatattacacctgaaaccatgaaattaattatttcgtggtgcaatcattatcttgaaactaataaagcatttaataataataatgataatagtaatgaatcatctaagagttacaataatatccctgcgggtacttggtcagataattcacttgatgagtatataagtactcaaacatctccaatactcgataattgggaacgtgatttccttaatatggatagctcttatttacaagatttattaattgccgctaattttcttgatatagaaccactcatagattctatttgttcaatcattgctgatcaattaagaggtaaatcaccacaggaagttgtcaatgcaatacgttcagctcataatatattgtgaatcttacgtaattagatatcaaataaacgcgcccttctattatcgtccacttcttcaaattcaacatgaaaaatgtagcccttcatttttttgccacttgaaaatccgtttttttaaaagataacacgttgattatcttaaacagaaaactttaacttattttgattattttataatactttaaaatccttttacaactttctaattcattaattaacaatggctaccactgctcaatctaaagtggatccaaaaggtttggttatacgtggaattgtcgatactgatactatcgaatactctcagttgttagttccaaaatcaacaatctttaaaccttacgtttggcctttccttatagtttatcctgcttactattatttatttgaaaattattatgatgtttatttcaagggtaaggaatggacttttatctattctttattattatgttcaactcacgctttaatttggcttttaccaagatggaatttagatttaaaagttcaattccaatataataaagttgattcattttcagattttaattcctcttgttatattttaatgaaggcaaaagcttcttttggtttgagtgaaatttgtaaaattgaaaaatcaagccatcaaattaccttcaaatatcaaaaaagaaaatttttatacaatcctgaatctaaaacattttcacctttaaaattctacattgatgatgaaaaattaacaatcaaaaaattgaaagggatttcaggtttttcaagtaatattattcctggtatgcaaacttattatggtttaaatacttttgatatcccagttccaactttcgttgaattattcattgaacatatgttagctcctttctttgttttccaattattttcaatatcattatggctaatggatgaaatgtggtatttatcaatcttctcgttaattatgttattttcattcgaagctacaagtgtttatcaaagaaaatcaacaatgactgaatttcaaagtatgggtattaaaccttatgatatttacgtttatagagataaaaaatggagtgaaattaaaactgatcaattattacctgctgatgttgtctcaattgttagaactccacatgaagatttatcaattccttgtgatatgttcttattagaaggttcctgtattgttaatgaagctatgttatcaggtgaatcaactccattattaaaagaaagtattcaaaatagagaagatgattctacatttcaacctgatggtttagataaaaattctttattacatggtggtacttcatgtttacaagttacccctcctgaaagaagtacaaattcatcaacttctaaatctcttattcctgtagctcctgacaatggtgcgattgctgttgttaccaaaacaggttttgaaacaactcaaggttcattagttagagttatgattttctcatctgaaagaatgtctgttgctaataaagaagcttttttctttattttattcttattagtttttgcaattattgcttcaagatatgtttggattgaaggtactaaaatgggtagaaaacaatcaaaattaattcttgattgtattattgttttaacttctgttgttccaccagaattaccaatggaattaactatggctgttaatcaatctttagctgctttagcaaaacattatatttattgtactgaacctttcagaattcctgttgctggtagaattgatgtttgttgtttcgataaaactggtactttaactgctgaagatttattttttgaaggtttagcaggtttcaactcaaatgctcaaactattttatctaaatgtgattcaaaggaagtcccagatgttacaattgatttattaggttctgttcatgctttagttaagttagatgatggtgaagttgttggtgatccaatggaaaaggaaactgttaaagtctctggttggaaattagatgataaaattaaaaatcaaatgattggtccaagtaacaaaaaaatccaaattctgaaaagattccaattttcttcatctttgaaaagatcttctgttatttttaaagttaataataaagttttggttggttgtaaaggtgctccagaaactatttatgaaagattaactgatgttccatcagattatgaatcaacttataaatatttcactaggaatggttcaagagttttagctttagcttataaatatttagaaaatgataaaaatcttgataaaattgaaagaagttcagttgaaaaagatttgatttttggtggttttattgttttccattgtccaatgaaaagtgatgcagttgaaactattcaaatgttaaatcaatcttctcatagatgtgttatgattactggtgataatccattaactgcttgtcatgttgcaaaggaagttggtattattactaaagatgtcttaattctggataaacctgaaaaaaatcattcaggagattcttcattagaatggaaaaatgttaatgaaactagagttattcctgttaataaagacattacgtttgatatgaaattcttaaaggaaaatgatttatgtattactggttatgcacttgaacaactgattgatcatccacaaattgagactttaattagatattcatggatttactcaagagtttcaccatctcaaaaggaatatattttaaatacttataaaggtttaggttataatactttaatgtgtggtgatggtactaatgatgttggtgctcttaaacaagcaaatgttggtattgcattattaaatggtactgaagaatctttaaagaaaatgcaagaaaatagaaaaattgaaagttttgaaaaaatgtatcaaaaacaatgtgatttaatgaaaagatggaaccaaccacaaccaaagtatcctgttcaaattgctcatttacatccacctggaccattaaatccacattatttaaaggcattagaacaacatggtactgttattactgatgaaattagagaaaaagttgcacttgctaataaacttgcagaagctgctactccaactgtttcatcaactgaaaataagcaaaacaatgttactgaatctttattagcaagtttacaagaatctcaagaagatgaagaagcgccagtactaaaattaggtgatgcttccgttgctgctccatttacttctaaattagctaatgtttcaactgttttaaacgttattagacaaggtagatgtgcattggttgcaactattcaaatgtataagattttagcattgaattgtttaatttctgcatattccttatctgttttatatttagctggtattaaatttggtgatgcacaagctacagtttctggtgttttgttatctgtttgttttatgtctatttcaagaggtaagtcgattgaaaaattatcaaaggaaagacctcaacctggtattttcaatatttatattatgggatcaattttaggtcagtttgcaattcatttaattgcacttatctatattactaaagaaatttacattttagaaccacgtgaaccacaaattgatttagataaaactttccaaccatcattattaaatactgcaatgttcttaattcaattatctcaacaaatcagtacattcacaattaattatattggtagaccatttagagaatcgattcatgagaataagggtatgtattatggtattctaggtgttgcatttttatgtatttcaggatcaacagagtttatccctgaattaaatgaagcaatgcaatttgttccaatggatatgatttttaaaattaaattaacattaactatgttacttgattttggtattgcatggttaattgaaattgtcctaaaacatttctttatggacttcaaggcagctgatattgcagaaagaacctatgatgatgataagactgaaaaatcaattgaagaaaagaaaactcaatagatatattacttctagttaattatttacactgtataaacaaatcaaattaaatctatctaattatatttatatgaatagctatcagctaaactaacgttattgtaatctatatgttttagttcttatcgtgttattttcttcggatcacgtaaattttcttcgcaggtaattttttcactgttgtgtccagatcaagtgcatgcagaagagtttttgattgtaagggggtccctattttaaattagcttttcttctctctcctttgttgttatcttattagtgaaaagcacaattgatacaatgagaggtaagttttttatatccgatataaatttatcatattaacccagctgatgatgattactaacatgcaatattattaattttacttttattttttaaacagattataaattagttgttctgggtgccggtggtgttggtaaatcatgcttaacagtacaatttgtacaaggtatttacatagatacatatgatcccactattgaagattcatactcaaaggaaattgaagttgatggtcgtgcatgcaatttagagattttagatactgcaggtgttgctcaatttactgcaatgagagaattatatataaagaacggacaggggtttttgttagtttattctgtcactgataagaagtcattggaagaattactagcaattagggaacaaattatacgtattaagggtacatcaaatatacctattgttttgattggtaataaatgtgatttagcagatgaaagagaattagaaccagaggaaggtattgcagtctctaaacaatggaataaagtacctttctatgaaactagtgcaatgtataaaatgaatgttgatgatgcatttattgatgttgttagacagattttaagaaaagaagttgagcaacaacaaaaacaacaagtacaaacacaaaaaattaatgaaccagaacaaaagaaccaacaaactccaattcaaaatgttccagctcaacaaaaacaacaatctcaaatgtctagacctgttactggtaacaattctggagctgcaactaagggatctgtagctaaaaactcgaacagtactccaaaaaaagccaagaaaagtagaaaatgtgtaattttatagtcaaaaacggtcatgaatacttatatagtttaaaaaattgttattcttctaagttttattgtaagtttttgaagactgtttatttccacaaaataaataatacttttaaacaattttgtcctttgtcgtttggtatttcaaaaaactatagtattgataatttataatattaaaaatatttttagcaaaatcaaaattataaattgtaaatagttttttcatcagccactctgcggcgcagtattttagagaatggataacatttttttgcccccaaacagtaaagggcaacttggaagtttggccgagtggtctaaggcgtcaggttaaggtcctggtctcttcggaggcgtgggttcgaaccccacagctttcattgttaaccttttattttttgctgttttgtaaataaaatttccacctatctctaagttgatctgaataaaagttcaacttatctttatgttcctttttctttcttgaaaaccatgcaaatgatcatatagaaactcaatgtcaaccttttatttacttgccacgcttgtgatattcttgacattaattttattgattgtattgattggtgatttaccaaattacagaggcacaatattacatagatcacacattattttagttgatagaattttcaatgagtttgcaaagaaatttgaaatcattgataagaattaccttaatggatttttcacatctaaacaatcaaagaggaggatacgttggatttcaggctggataatacctgtcttttatttagctgtgtttactaaatttcttcaattcttttttactctgacatttccacaaatattgaagcttgaaaagctatctaaaacagggtttgactggagtattagattaaattttgtcattatacctgcaattgctataaactatctttcatttttgttggctgttttatcagatcctggatatattgatacaaagaaaccatatgatagaacacaatatgttaaattgttagaagaatttccttttgatggtctacttttctttaaagacaaaagctgttcaacttgcaaagttattaagcctgcaagaagtaaacattgtggtagctgtgatagatgcattttgatgtttgatcaccattgtatctggttaaataatgatgttgcttattacactttccgttggttttttattttcttatgttcagtttgctttgttttcatatatggtgcctacttgtcatattacagtttgatgatgtacattaaattagaaaaacttccaaaaattgttgagacttcaagtggtgttactaagtattggagacttattaaaaattcaactttcactaatgaaatatcgggaattatgtttctattatgcatacttttgtttccactggttggatttttcttgggggagactatatggtcagtttatctaggagttaccaccaatgaaacagcaaaatgggatcatatccataattttatggaattcaaggttttataccaatttttaccaaatgataattcaccaagcacattcttactattgaaagagaagacggcagatgggaagccgctttttataaccatcaacgatagattaccattcaataccacagctgctggcaacttaaagggtataaatgattgggatgacttggcaaatatctacgataaaggattttggagtaatttagaacaaaaactgtttccaaaaaaattcaattaatttacaatgtataatattaaaagaatgtaataaacttatgactataaatgaatgtaatttgtaaaatgatataaaattaagataaaaatttaataaataaaaacaagattaatgttgggaaagaaaaataacattaatgaattcatgaaatttcgtataatacatgtggacaatgaagattggatataatagtatcagaattaacgtgacagattactcaataaacttctagcattagttaactctggtaaatcgagactagttctcaaaccatcaaaacttggacctctatgttcagcattgttcaaatcattaagattcatatttcttctggtttcttctaaactgtcaccaataattttgttatttttaactgataagctcggacttgtaagagtaccatctggattaattctacccttttgaaactccatttcaatttcttctgttgctaaagtttcaagtgatgggtttattggaatggaaggagaaaatttattgttattaccacggaacattctgctgaaagtatttccacgagcacccccactaccagtaatggaatctctatatgatggaccaggagcagggaaatcaacaggagaaacatgtgcttctaaagtatgagattgtgtgtatttagatatcattggtctgttaggatctgttggatcataattctttggatattgatcaaaatcacccttttgaacacattcacgaataatttcaatatctttaggatataaaatggaacatgtaaaatcataaatgaaacgaggtaagacacacatcagataaccaacaaagaaacatgcccaaaatgaaggtgcaccatataaacgtgcagcaactttgtagaattcacctgacccggtggaagaggaccaaatacccgtccaaccaaataaaatgatatttgaaagaaaattaatcaaacatgataaccaatcccatctatattgtcttaacataacatatgaattacatgaaacaattgcaatggaagcaactaaagcacccatataaaatctatgatcaagagacaaaccaacattggaaacaacaccagatttgtaatataagaaatatggatagaaaaaagaaatgatagactgatagaatccatcaaccatataccagtaaaatttttgaaaattccattcagatcttaaaataccagttctatacaattgtggaacaagtaaagaaacataatcatcaacatcttgatccataatacctaagaaaataacaggtaatgaagtaaatgccaagttatagaacatcaaataagtgtattcaaataaatatgtaccatcaaaattgtcataaataccataccagaacaacgctaatgtgaaaacaacatttttataaaagaaacatggaatcatttccgctaatcttttataagaccatctaccatgaactaaaactaaacgacctaaatatctgaattgaccaattgcataatcggaagacataacagcttgagtaccttcttcaccagcaataccaacaccaacgttcgcagcttgaatcatagaaacatcattcgaaccatcaccaattgctaaagtcataacatctaaagtttctttaactaatttaacaacagatgctttttgtgctggagaaactctacaacataaaacagccttacattgtttacagagtaacaagaatttaattctcaaagaatcacttaatgcaatcttcaaagcatcaccatcaatgacaacaccaaaattaccacttggaggagcatgaatttttctttctttttctaattcttctaatgaaccaatcatatcaaaataatcttcaagatatttttcaattaaaaatttaacaacttctgatttatcttctaatacagtatctttcaaatgttctggaatcaatttctcaatatcttcaccagttgttttgataactaacaattgcattgtgttttctaataagttacatgaaaatccaatattaatagcagtttcaactttatcacccgttaaaacccataatttgataccagctcttgctaataattgaatacagtccggaacaccatcttgtaatctatcttcaatcgcagtaccacctaataacattaaatctctttcaatcgatgaagcaacctcttccattttatcttctctattttgtaatgaagatgcagcttctttatgacgtctttgccaatcagtatattgtgaccaagataattgcttttgtgcaatacacaaagttcttaaaccttcagtagcaaattgttctaattgaatagcagttttttctaataatgttttatcatttttatcacttaaacgagaataaataatagagtccgcacctttacagattaataatgctcttggttctcctcctggtttacttggtggtaacttgataatagcactcattctttttctggtagagttgaattccaaaatatttaaaatttgatattctttttcttcaccttgaacatttaaaatcaaaccacttttagttctattgacgaatgaaaaaccaacatctctggcagtggcaacaagagcagcttcatctggagattgtgcctttagctcatatttggtaggatctttttcagatctttcagttaaaacactatgacaaagagccaatgctaacatgaaattttcattagcttgtttttgagtttcaccgcttgcaccatttaaatcatttgcaaagtttttagaaataaaagttaaatcatcttgaatagttgaagaaagagaaccagaattaatttgcgttagcattttaatcatttcaactttatcatcttcaattcctttcttttcagctatagcttcttcttcaacatcaactccttgtcttcttctaatttcagcatatgcctcagtatacgctctaccatagtttacaccattaattgtacattttttgaattccataacattttgtgtcaaagtaccagttttatcactaaaaatatattcaatctgtcctaaatcatcagaaatattccaagatttaggaacacaaggataatctaatttttcatagtacatttgaagatcagaataaatgaagaatgcttgaactgtcttgataatttcaacagaaatataaagggaaattggaattaatgattggtataagataagtgccacaaagaaactgacaataccattaacagcaggggaaccaactaaactagcatattcaaaaaacactcttgacacttgtcgattgttatagaaaacaccattaataacagcagagacaaaacaaagaacaaataataacatgaagtttaagataacagaccaatttaaatcattagcgattcttgatttctttgttggagtaataccagcatttaacataattttagtatcattacctgtaaatgcaacaataccaacaacccatttagtatttcttaaggaacaacctcttaataaaatattgttaatattgacgggttcattacacaattcaccacgttcatcatcaccatttgcataatagttcaggttaccttcataactatacaaattagcctttggaccttcactttctaaccagaatttacattttgctaaatcatcaactgatttcaaatcaccatgggagcatttaagtgcttgtttaactttcaagttagtttcaccatctaaatttttagtttcaacataacatgcaccatcagaatcagatgttgatagaataagaatatcaacaggaatggagtcattatttttaattttgacaatatcaccaacatgaatgtttttccaaaattcttttttaaatgttggatgtgtaatgtaatcatcattatatgctgaaacaaatggtggaaaattttcttcacgatcattatcatttgtatcttcatttctcatactaatgggatcactgaatggattaacatcatcactttcttgaatattgttattatatctttcttgctgtaaacttcttctataatcaatactatctaaggattttctaccataaccatcttcagccaaaggatctatttccttttgattcttaatttttctcagcattgaaaatatgaatttacttgtagcttttttaatttttctccataaactgacgttatcacctgtaaaattaggattatcaataccttttagtacatgagtgatttgattgttaacttccaggtcaattacagttcttcttgaatcctccaaagcatctttaaaagcggtaataacaacaataacaattaaaggaacagaagataatgcaggacttggaacaccaaaaattgagaaagcacctaaaatattcattgttaagaagaaaacattggcaatattaccaaattgaaaataaagattttttggaataaatgtaattggagtatactttgttgttctaatcttatttcttgcatattgaggaggattcccaagatcgtctaaatcagtggcaggtaaaggaaggttccaatagatatctcttttcatatgtgacatatctttttcatctttattagcattctcatataaatgttcatcatcacctgaatcagtttttgggaatagttgaggaggtaacgaactttcaaaaactttctttaaagttttacttctatttagaggtctcccatcctttttacgttgagtaccccatctatgcctttgaaaagttgttttatttctttgcaaattatcatctttaattgcaccagttgttaattccggtaactcatcattttcttcttcagattcatacaaattttgttgatgaacatttgaattttttaaatttattggagtaaacgaattagaagaaaatgcagaatcttggtgtaccattggagttttacctattgaatttgcatcttcaaaatcatcataatttgcttttgaagaattggtactgtaacctgaaaaatgtcttttatttgaatttagattagatttatatcctacagagggagatggtaaaggatctgcatatgttagatcactaaatttgtacttatcagcaaatggactatttggattatcgtcacgggacatttcaggaattttgagttaatttattgaaaaacaaaaaatattagatcagatggaatatttttttcctaaatgtgaattattaataagttgaagaatataatattattctatgaataatgtaatacagctcagaggtgtataccaatgaaaagttgcttatgtgtgtgtgcctgtgtatgtgctcaatatattaatttataagcgttatgatttaatcgtactaaaatagaatcaaacacgtatattaataattgatctattgagtataataataaagacacaggatattctttttcaataagaattgaatatatatgaagtgacaaatgaattaaagatactctattcaacaccagaatagacaattgtcttacaaactaggtttaattaataattataataaataacttataacccaaccaagcagacagaaaagtatagatttctcgtagttaaaaaaagtgaaagagcagaaatctcagcttagaaaagttacttaattccgcattctttgtaatgtccttatgtaataatagtaataataataatttatccccttttacatttttcggctatttaattaaaactgaaaaattattgcccttttttgccctcctgtaatttttatatttttaaaatattattattgattgatgaaggctcgtttgttgttattgatttgatataagttcattttcaattttaaatctccatttttttatatttttctctttcttttttagttgatatgctattagataccattgaaagatgcaaaatggctcatatactcaaaagagagatgtcaattatatagagattccaagagattcatacacggcctttagggtgaaatattgtgatgctttagaactttacaacacgtccacggtcatatccttaggttcaattcctcattattggttattggataaaaaatcagttttactggctaaaatttacagatttagaaggcttaattcagattctaagcaaaatgttacaaatccggaacacagtgccctacaccaatttgagaatgctgtcaataaaatgagtcaagaaagtatgcctgatactttacatgataatataaaagatttcatatttaaagggctgacaaagaatcatttatcaaacggagaaaatgaacatgtagcagactcatttggtgattcaattgataagtttattgaatcaaatattcatctactatcgcatgaattatcggagtcaaaattaaaatcttttatattacatctgaaatcagagaaagaaaaaaataataatagtatttatacatctgataatcaaccaaatgaatctaatgaaacttcaaattccaaattttatgaaattgttaacgagtttgcaaattcagaatcaaatacaaccgatgaaaatgaagaggatgatgattttaagattcagccctatctttccgaagataagaaaatgattgatcataagaaaagtaatgcacgccatcaacaattcaatgatagtaaaaaaaacaaaactgatgcccaactgaataagttttatcaaacaaccaatgatgagaaacaaaaaatcatagataaagagataaatgaagcaatgatactacttcaaaaaaatagatctaaaaagaagaatattgaagttacaaaatcttcagaaactcttatcaaaaacagtgattcttgtgaaacagatacatcttcctttgttacagcttctgaagatgatgatttgattaatgccaatgataaaacggctgaaattccacctgcaactgaatgttttccaactagggtatctttcaagactactttaaatacaggtaagaaagttacatttaccgaaccacaaaagatggtacccgcatcaagtatttatactttgaaaagtaccagattaccattagataaacaatctcccatgccctttgaacataataacaggaaattgaataatgaaaatgataaaaatgatcatgaaaaccctactgagaataccaataataataattacgatgataacaaaaacaataagaccaataatgaaaatagtcataatgatataaaacttcaagggatattagatcataatataaacgaagcatatactgacattgatgacgaagttatgcagacatacaatctgctcaagacaaaaacattaggtgcaagattaggagtaagtcatgaaatcaatagatttgaaagaaggagacagtacaagaaacttttccaaaaatttcagactggcgatattattaaaatggagaaaatgttagttttagtcacaaaaatagaaaaattcaaattaaacaaagatgctaaaaaatcgtccagaattgttgaaagatggagagagtatatcattgttgttagagctacaaacaatgtagaatatcctgcagttattcagttttttagaactaacaaagttttcaggaaagaagatgaaagcaatttactagaagaagttaatcgaaatatattagagacaaaataccctaatagtgctgaagatgatacgttaactactgatttaaatagccaagctccaggggatttttttgatgcttctgacagcgaaaatgatggtgatatatctgaggaaaataaggattatgaatcagatgatgataatgaaacctcgtttgaggaagatgctaagataggtcatgcacataaatcaaaaaaatctttcctgaaaagaaagaaggagaaaataaaacgattttcatttggacaaaagaataaaatgatggatgttacacattcaactattaaaaaggagaaatttttacacatccacgataatgcctccgatagacattatcaattttcattagttctttcaattcatgatacatcaatttcatttgctaattttttggataaaagtattaggataagcagagataagaaaaactcaacagtgaactatacattattaccccattcaacatcttcagctattgtgtggtatagtttcttgagacagttattgagtccaaaaactttaggaaagaataaaacaaatgcatttttgataagcattccagcaatcaatatttcatttacctttatgggaatcaattctttatacaaagcttataaagaagaaggcgagaataaatctaaatttgtcaaactaggatataaaccaacagggtattattatcccaaactaccgacattcgaaaaactgttggatctaattttggaacaaatacttaagctagaaaaatctggtaaactacctcaaattcccgaataccaatattttattaaaaaattaaaaaatgatagaactttcttggcattatctttcagaaaatatgatcgtctagaatggattttaggtgaaaatgaattgattgtgcaaactttatggacaatttttggatcaaattatgaactggaactccgagaatttcaacacgaaacacattatttgtgtgatagaagtttaattgaaccattacctattgaagggtttgttgctaaattaactgatagatcaggaaatttgaaaaccaaacttggtggtcaccattatagattattttatgcattttcagtagagaacttattatttttacaagacttttatcatgcagttccaatatttcctaactctgaagaaaatgaagatttcgcatataattttattacaccagccggggacgtcaccaatttgcccaaacttgagaaagcatctaaatttaattcaactgtttatcaatctacaccatttccaagaacagctcatcatattgaatggttaaaaccaggaatcacacaagaggaatattcaaaatatgatgcaaatgctctatatcatgccgaaagacgtgcttgtatgttatcaaatgcacacgccgttattgatttatgcaatattattgatattaaattagtgcctagaaaagagataagttttgtgaccagaactgcagcaagtactgtttggaaacatcccaaagggaagaaaacagtttctaatatgtcaggtaaatcagatttccacaaatttgctaagaaagttgaacttaatgacgatgatgagtatgtcgaaacctgtttggatttagtcatgtcaagtggtgttattttaagattacaaactgaaactaagactgttagagatgaatgggccaaaaatttgagtaagcttgctgagtattggacaatcaaaaaggaagaagatttagctagacatgttctattaaaacaaatgaatttgaaattaatgaatacagaaaatgataattatgaatcaacagttgcaaatgaaaataataattttttgaataagtgggaattggcaaacgcatatacagattctcaattatacagtatttcaacatactctcttgataaaccagttttatttgaaggatatatctattgtaaaaagttcaagagtaaacaattttatctatttcatgcagttttaagtcctggatttttagtattatatctaccgttcaatagatccagcagaacgaaagttgctaaaaactgtgcgtatcatagaaagtttgctactatatctttagctgaatgttatgttttttcatctgtcggtaaagtcacaggtgatgtaaatactaaattgttttccaatccattgaatggatatagtggattacctagagtttataatgatggatggagaagtactgagtcaaaacaaaagaggtcttttactttatggtttggttctaagaagacaatggttcaaaatattaaaaagaaaacaggagtgaatatcaacaatagtgagataagatccaaatatgatgacattaatattacaggcgaatcagaagctcaaactatgaatattccacacagaaaaacttcagaaaacaactcaactaaactctccaatttgaagaataaatttagaaaattagatattaccaaagataaaaaggatggagaaaatgatagtaaaagtgatttcaattttaaggatgagtcaaaatcaataattgattttgccattacctcggattcagaaaccgaaacagatatagatcatgatgaagaaaatgaaacagattttgatacagattatgagagtgaagaagatgatcagaatccagagacggatagtaaatctggcaattctgataatttatttcaaaaaaatgaattaagtagtggaaaaaggcacacaacaagagcattaataaaatctgccaatagattaggtgttacaggaagagcaattttatttttagctagatcaagaattgaaagagatatttgggttacacgtataatgactgaaattgaacgtttctcaagtgatagacataaagacatcgagttagtttgattttgtaaatattaatgtttaatgtactatatataatactatgccattttattatagaaaatacccccaaaatataaagaaagataaaaaaaatgaaaaagatgaaaccgtaaaggaataaaattttgaaatattattatgtagaatggattaggttatattgccttccaaacatataacatttcatcccaacctgtacttgcaacataacctcttccccaaagagaccaatcacaacctaatacaaattctttatgcatatcaaaattatttattagagaatcaccatatcttaatttcatattactcatatatctagcaccttcatcagtttgatctttccaaattttacatgtcatatcatatgaagccgacattaaagtatcagaagcatgaggagaccattgaactttacgtactgcaaaatcatgacctatcagtttattaataggtgaaggaccaactctattcttctgtgcaaggaaattatgttgtaaatcaggtatcattcttaaatcccaaatttttattgatttatcaactgatgcagttgcaataactgatgatctatatttattaaaatcacaggatagtacttccatacctgcatgtgaaataaattgcatagctaaaggatttgttgcccttgtatcccatatttgacaaagtgaagcagaattaacagacattataattgaaggatcatgaggtgaaaatgaagcttgataaacacaatcattattattatttggtattattggttttgtacttaatggaggttgatccaatatatttttatcagtttttattgtagtatctttatttgatgataatgtaattaatgaattatctctaattggtgaccaaactttaactgtactatcccatgaggatgaacagaaaatagatttatcaaccaaattccaataaacagagaaaacttctctttgatgttccttaaaacgttttattgggaaatttgataatgttatatcaaataatgaaattgaaccatcacctgagcaagttaaaacttgattttcatgtagttctgaccatgaaatatcgaataatccatcttgtgtatcaaaataattatcttgtataattctaccatcatcagttattgacaatatataaagtctaccattacccacaagtccaaaatttgctgctgttgcaactgcaagtttattatcataaaatggtgaatacttacaggaatatccattatatcctgttgttttaaatgctaacatatttttattactcttattttgattattctgatattttatttgaatttattgatgagtgtatactatgtatattttttaaaagttattgtcaaaatatatttcttctctttctagtgtacggttctctaaatagcgtgtgtaaccactttgagaaagaaattaaaaagaaaagatatataccagtttttaagctggaaacccgggggttggaaaataagtaaacgtgttgaagttcaagattatgtcatcgctgaattggacgttcttatcggataatcgcgaatttttagaataaagacaacatgaattggagaaatggttagctacccaattaggaaagaatatacgttggttatacattaaagttattatagttattagttattagttatttatttagtaaagttgctatttgtcatcaattgatgatgaaagcggttctgttagaggtgaggatttcgcatcccaattaaccattgaattaattgttgtatctaaagtcttttcatctttttcaacatcatcttcattattcacttgaaaaaatggtgaacttggcattggtaacctaaactttttagaacttgatggttcaaatttagatttctttgtatttgtattaggagttttaacaaaatttgattttgtaatagtattaggattattaggattattattatcattagtattattttcatttggttccattacatcagtttttatttcattcatttcaagatttcttggagtcattttgaaaccatttggagaatcaccattttgaatggtttgtccagtacctggatcttttggagttatatcatcatatttttctgaacgtgataaaactctattaatttcaacatcatcacatcctttaaatctatttgataaattatcattattaattggttctgatgatggttcattaaagaaatcatagttccattcatcattaccagttgttttacttggcgatgttggttcattagaaaatgattcaattatacgttgaatacttggtgacataaatgcattttcattatgtaaattaaatggtttagttgataatgatggaggaggcatttctgaagctgtgttgttattattattaggtggaaaattttctttatcatcatcatctaatggtataagtgttgtatttaatttagttgcatcaactggtatattatcaacatctttataataattattatcatcaggtgtattatttttagaatgatttttagatgatgtagtaggtgaagaagatgaaaatttatgatcagaaaaaatgaacatatcttcaattggttccaaaccattattcaattgcatattcatcaaatccatattatgattcattaacatattcatatctaaatgattattattgttgttattgttattgttgctaccattattaaagttggagtctaattttaaaagatctaataaatcttcattattaataccttcatgaatggtttgatattgtttattaaatcttttacctttactataattaccaacaacattatttaataaacttccaccattataagaattttgcaaattaacaggagatgatgaaaaaaggggtgaacttgaattatcaattattagtgatgaattaattgattgtttcttctttgtacgtttagtaactttattctgtgtttgattttgtacaatattcgaagagtatggaccatctaataaaccctttgaacctaatttacctctttcacgtaattgttttatatcatttttagattgataagatgtacaaattgaacataaataaccagaattagccaattcaaaaataccatctttgaaaaatctaaaaggaggattattcgatgaagaacaattaatacaacgttttgaatttgtaattactgacgaggatgatgaagaagaagttttagtagtattattactctttttatttaatggtttattaccaattttaacaacagattgaataaaacttttacttttttttgcctttgttggttgattatctaaattgattgatttatcattttgaaaatttgagaatctggaagaaattggttgaccatttgaatcaacttcttcatcaattttttcattcatcatatcagataatctaattctatgagctaaagaatcttcagttataaagggtaatgattgagtacgagaagctaattgaggtaaatttggtaaaattttattatttaatgaattattaatgattgaagattgctttttaatcttttttctttgttgttgctgtgtttgaggtgtgattaattcattatttgttaagggactactgttattattgttgttattaatagtatgttgttgtataaactgtgtatttgagggtagactattattattattattattattattattattattataaggatataatgaatgatttttagtaattgaatttgagagaggagatagtcttaatttaatatctaacgtatccagtattgcagggtttttgttattaacattaattttattattatcattattattatcattattttgatataaatttaaaatattaatagataatgtaccggttattataatattcgaagaatttgaattaagtatatttgaacaaagaccagaagcaacataaggttgaccaaattctaccacatctttataataaattgaataatccatttccttttgaaagaattcaggagatattgaagataataaatttaaacaagattttaaatcaatacaaccaatttgtaaaccattatgagggggttgatttggtaaagttataattctagcattaattggagatgaggatcttgcaagaaaagtattttgatcatcaaaagtgtataataatttcaaattgactaatttattgaatggctgtgaggatgtcatttgaatattgatgatttgatgaataatagtttgaaagagaagaagaagaagaagaagaggaagaaggggaaaaattagtgaaacaaaatcaagaaaacaaagttaagggagaattgaagcaaaagtgaaagcaaaaataaaagattcttctctcaaacccagcagtgatacacgtaaaaaatgatacaggtcgaaacgatacattaaaatacatcagaaatagctctttgacatgtatcaaacgcgtcttttaggagataattatgaataacgggtgacgcgtaagctaaatttattattaatttcaaaagtagggcatatatattatgcgtcgatgggtcggctattatctcctaggaaattgatgagccactcattcattcactcactgagagaaaattgcctcccctctgctctgcccccttcgtaaattcaaattttgctcaaatcacccaatttggctgagagggagcttagcaaacatcatcttatgttaatatattactcttagctattcatcacttatgtcatattgtgtactatttaatattgtaatttattacctcctttcacctttcagtcttatcttataatgaatatagttattgaaatgaatatatatgtgtcgcagttatcgggccaattaccatggtataacttaatctaccccatatattgatagacccttgtaaaaaaagaacaatagaaaaaaaacaataggaaataatagtgaaaaaaagaaaaatacaataaaagggtctaagccactcatgacataatctattttttttttgaaaaaagataagatttatttttattttttcatttttttatttttaattttcttttcttatcacatcgggctatttttgactctttttccatagttatctgtttctatataagtaatcagctcatccctctttttctgttttcattttatttactttaagtaatatttatttcctatctgtaattactttaattactttaattacttcctctttaatcacacacacacttacacaaagttaaacatttatatgtctgttgaaaaaaaaagtgaatttacagaagatattatatcaagagcctcaacattagttaataatgatccaagtcaaccatctacagctgcaactcaatcttatatgattccaatagataaatgtttgaatttatttaatacaagtaaaattcatggtttatcaaatgaaaaagctactgaattattaaaactttatggtccaaatgctatttctgatggttctaaaatttcaattacttcaattataatgagacaaactcttaatgcaatgattattgtccttattatttcaatgattatatcatttgctattaaagattggattactgctggtgttattacttttattattgttcttaatgttgttattggtactcaacaagaatataatgctgaaaaaacaatgggttcccttaaaaatttgagttctccatcagctgtagttattagaaatggttcagaattaacaatagcatctgaagatgtcgttcctggtgatttaattatcgttaaagttggtgatactattcctgctgatttaagattaattgaaactcataattttgaaactgatgaagctttattaactggtgaatcattacctgtttcaaaagatgctaatttaatctttaatcaagaaattccagttggtgatcgtttaaatttagcctattcctcttcaaccgtttcaaaaggtagagctattggtattgctgttttgactggtcttaatactgaaattggtaaaattgctaaagctcttaatactggtaattcaattatcaaaagagttgaaaataaatcggaagcttctccaaaagattatgctcatgctgctggttggactatttggaattcaactggttatatcttaggtattttagatggtactcccttaaaaattagattatcttggttagcaatctatttattttggattgcagttgtttttgcaattgttgttatggcttctcaaaaatttaatgtcactaaggaagttgctgtttatgctatttgtgttgctctttctatgattccttcatctttagttgttgttttaactattactatggctgttggtgcaaaggaaatgttgaaaagaaatgttattgtcagaaaatttgatgctttggaaaatttaggttctgttaatgcaatttgttcagataaaactggtactttaactcaaggtcgtatgattgctaaacaagtttatattccaagtttaggtactttttcagttgaagatttcaatgaaccttttaatccaacattgggtactgttagatttactgaattatcacctgttgaaatttcaaatttaaaagataataaaaaggaaaatgaaattacttggattacttttaatgaatttgaatcaaaatacaaaaataatgcttctaaatatgatttatttaaaaattggattttaacagcttcattggccaatgttgctaaagtttatgaagatattgatgatagtggtattaacgaatggaaagcaagaggtgatccaactgaaatttcaattcaagtttttgttacaagattaggtttcagtagagacgaattagttgaaaataaaaaccaatttgaatatttagcagaattcccatttgattcatcaattaagagaatgtcatcaatttataaaaataataatgataatattgaaactatttatactaaaggtgcagttgaaagaattttaacattatgttcaacttggaataatccatcgactggtgaaattgaattaatgaatgaaaatacaattacaaatttagaagatcaaatgaataaattatcatcaaatggtttaagagttttagcatttgcaaagagaattccaaatgatcaacatcttggtttaaaatggcaaaaaatggatagagaattaattgaaaaagatttacattttctgggtttaattggtatttatgatcctccaagaccagaaagtttaccaagtgttaaattatgtcatcatgcaggtatttcagttcatatggcaacaggtgatcatccatcaactgcaagtgcaattgcaaaagaagttggtattttaccagataatattagaatgttaccagaaaaagttattaattcaatggttatgactgcaacacaatttgatgcattaagtgaagatcaaattgatgcattacctgttctaccattagttattgcaagatgtgcaccacaaaccaaagttagattagttgaagcattacatagaagaaatcaaattgttgcaatgacaggtgatggtgttaatgattctccatcattaaaaatgtcagatattggtattgcaatgggtaaaaatggttcagatgttgctaaagatgcatcagatattgttttagcagatgataattttgcatcaattttaaatgcagttgaagaaggtagaagaatgagtgataatattcaaaaatttgttattcaattattaggtatgaacgttgcacaagcaattttccttttagttggtttagtttttaaagataaggatggcttttcagtcttcccattatcaccagttcaagttttatgggttattgttgtcacttcatgtttccctgcaatgggtttaggtgttgaaaaagctgcagatgatgtcatggatagaccaccaaaggatgcaaaagattcagtgtttacatgggaagttttaattgatatgtttgtttatggattagttattgcaggtgcatgcatgattccatttgttattgaagtttatgcatatggtcatggtgaattaggtgaaaattgtaatagaacagattattctgattcatgtgaatatgtttttagagcaagggctgcatcatttgtttcaatgacgtggtgtgcattagttttagcttgggaagttattcatacaagaagatcattattttatatgcatccagattgtgaaaaacctttaactcaatggatgaaagatttatggggtaatcaatttttattttggtcagttatactaggatttatttcattaattccaacaatttatattccagttatcaatgattatgtttttcttcaaaaaggtattactcatggttgggcttgggctttcttatgtacattattatttttactttctgctgaattatggaaatttgcaaagagacaatatttcaaaggtgaaactgctcataatcctgaagaagatttagagaaaaatggtacttttaaatcatttaatgcattataatcattacatagatattctgaagagaattaattaattattttatcattattattcattgaatcataaaacatcaaaacaaattaaaccaaccactttattctattttgctttttagttattacaattcaatcgttttgcttttccttattatctttatatagttaattactacttttctacattattaaagttttctattcatcttttaacttaaatagatgatttttttatataactaaatatttcctatataatcaatcaatcaatcaatcaatgaattatttaaattatcttttataataaaatctagcaatgacttaaagatatcagtctaaatattatacaatcaatgtttattaactgaagcaaatggtggatgaatttttggaatttctctcttatatttttcatcaacatccttttgagatattttctttaattgcataatttctgaatcttgaataattaaagttttataataactccatttaaaaattgtccaccaagtattataaaatctataatttggccataaagtatttggaaattcaattacactatcttgatgacattgccataacatataatcacttaatcttgtatgacctgaagttctaactaaaatatcaacattttcagataattcattataataaaaattattttgaaataaatcttgattaatatcatctaaagtaatttccttattattaaatttttcaataattttatcagttgcataccacatatcatcccttgaagtataagggaaagcaataaataaaacatgtttatcatgatgtttagtacgttcttcaaccatttcaatatcacttaaaatatcttcaggtagataagatttattaccaataattttaactctaacactatgtaaatcacataattgattttcacttgctaacattgctaatttaacttttaataaactgaaaattgtatcaacttcttcaggtttcctactaaaattttcaattgaaaatgcataagttgtaacattcttaacaccaattctaaaacaacaatctaaaactctagctaaagcatcagcaccttgtctatgaccttcctttaaaggtaagttattaattttagcaaatctacgattaccatccataacgaatgataaatgatttggaattggaccagttttcaaaatattaattaaaacactttgaattgcaccttcaagaatagatacacctggaatatattgtagtaagtttgtagcgtaagagtccatacttgctaaaaggaaaaagaagggaaatcaacatcaatatctattctttatcttcagctgagccttttatagatctcgttaatttcaaatggggtatataaataaatcgctgagccctctccaacgatatttaataatgcaaaatcatgcgccacattaaagaacttgtaaaaacagagaaaatgcgccacaaacttagagaataggctataagtgagcgatgagttcaaggaacggcggaagtgtgagaaagagctagtggcggtggcataaaacgaagggctatttttgacatgctgtggagacacacacattccggtaggtccgtatggtgtactaattataattatagtgattgtattatattatattagatgcttgaagttatagttaatttattcaattatacaattatgaacgttaaaaaaaggaaaagtaaaaaagtaaaaaagattaaaggtaaatagcacaataaaacaaaatgtttacaagagtgattgattaaattaattgaaattaattaaattaaattaaagtaaattaaattagattgtaagataaaatagtaaattatagtatattatagtatgttatcatatcaaataatattatacttataataaagcaattgcacctaaagctaatgcaaaacctggagctaataagttagctgcacctgcacttgaaactgattgagttgaagattcagttgcattaccattagttgaagttgaaatttcagctggggttgatgaagtttcaactggggatgaagaagaagttgatggagcaacagatgaagaagttgatggagcaacagatgcggtagttgatggagcaacagatgaagttgcagaaggtgcagatgaagcttcttcagatgaagtagcagaagcagcatcaacatttggttcaattcttgatgaataccatggaagttgagtaacaaatgctgaaagtgatgataattcttcaccagtaattaaggtagtataagaatcatcagtataagtttgtgcttgttggtaaagtgataataatggtgcagcattaacttcagtattttgttgaacatattgtaaataatcattaacattacctgcaacatcagagttaagagcaacaataatgttttctgcagagacagatgctaaaagggaagcgattgagataatagctgagttagagaattgcattgtgaatttatatatgtaagatagtttcttgtcttgacaaagagaaagaagaaatggggaagaagagtcaattgaattgaaatgaaattaagtgaaaaaagtgccaaagccacttaatttataccaactgaacaggaaaactgcacaaatccacagagacagtacagaatagagtcactttaacgttcactgagaaacgaaaaaaaattttctaattttccaccacaatagaaactgtctaaacttaattaaatttgggttcttcttagcacaaacaagcggagagatttcccttttcggattaaattaaattataaaatgcccaactttttttacgcgcaccacgcgcgttctagaccggtcacgtgatattgtgaattttaaaaaaatagatatgaaataatattttttaaatattacgtaagaatggatatctcaattgaactacattataatttatttagcaatcatcaaattcattgttttagctttgttttaacatttttattaatcaagaattatatcctacattattgtcttgattctgacaagtaaatattggaataaaggggttccgaggaactacgaattatcttaattttaaattttatacccgcatataccagcaacggacaatcaaaacgttacattttggagacttagaattgaaggcttaaaaaaattagaggcttaaaattgggggcttaatttgttagaatcttaaaatcttaaaatcattatgtataatcataactgttaatgttatctttccatctctaagttaaaccaacggaaaactgtagtaccgacatctttaatgtaatatagtatgaatataatattaaaatattaatatctgaaaaatactataaatatgtcttcaattgcaaacagaattgataaatatgggtcagatgttaaatttatgattattttttcataaaattcaataaaattttactaattcatcaaaacaaccaaacttaaatgtcagaagttgctagacagtcattctttaatggtgaaacacctcatattgcaagtggtatagcatatactgttgtattttcatttctcactgttataacaggcacaatatctatttggagtcatcaatggtggtttttatgtagttggggtattggattattgttagaagttgtgggttattctggtagaatttggtatactttaaatgatactagtagaagtgcttatgttatggaattagtttgtattactgttgcaccatgttttttaatggctggtatttataatatttttgcacaattagttttagtttatggtacccaatattcttatttaaaaccaaaactttattcaactattttcattatttgtgatgttttatcaatttttattcaaggagctggtggtggtatctcatcaggttcaagggttaattcagttagtacaggttctaatgtaatgattgttggtttagcatttcaagttgcaacaatgtcagttttccagcttttatggtattcatttattgttaaaattattaaagaaaagaaacaatttggtgattcaaattttaatcctaatttttcacatgttagattaagaaaatatttaaattgtttctttgttgcaatatcagtttctgttctcttaatttatgttagatcaatctatagattaattgaaacagctgagggttggtcttctaaaattgccactaaagaaatctattttgatatcttagaaggtttaatgatatctttagcaggtttgattatgtgtattttttcaccaggttttgtttatggaagagatgctcatttaaaattaaataatgaaaaagctggtgctgatggttcagaatcttattcacaccctttagatgataaagatttatataatgaaagattaacaatttaatttaattaactatcatatatgtagatcatataactatactctatataaacattgctttattaacattaatttttgattcaagaaaagccaaactgtgcaatagtctataacaaattatcaatacaaaaaaggtgtttattacatcagcaaaaattgaaatattcatgctcgctaacaaatttaaagatttcattccattacgttacgtacagcttttagcttctaatttgccctctatatattgattgaagtatagggaatatttctgtaacatataccaaatacaacaatgtttttaacaagaagtgaatatgatcgtggtgtttcaacattctcacccgaaggacgtctttttcaagttgaatattcacttgaagcaattaaattaggttcaactgcaataggtatttcaacaagtgaaggtgtgatattgagtgttgaaaagagagtttcatcatcacttttagagagtgatagtattgaaaaaattatggaagttgataaacatataggatgtgcaatgtcaggtttaacagctgatgcaagatcaatgattgatcatgctagagtttcatctgtacaacatgatttatattataatgaaccaatctctgttgagtcattaactcaatcagtttgtgatttagctttaagatttggtgaaggtgcatcaggtgaagaaagattaatgtcaagacctttcggtgttgcacttttaattgcaggttacgacgatgataaaggacctcaattatatcatgcagaaccttcaggtacattttatagatatgatgcaaaggcaattggttcaggttctgaaggtgctcaagcagaattacaaaatgaatatcataaatctttaactttaagggaagcagaagttttatcattgaaaattcttaaacaagttatggaagaaaaattagaatcaaataatgctcaattagcaagtgttacaaaagatggtggatttagagtatattctgataaagaagttgctgaaattatagagtttttaaaacaacaagaaaaggaaaatgaagatgttgctcctactaatgacggtgatgatagaatggaagaataattctgatataatgtatactaatatttttcattcttttataatatcttcttgttcattttaaataaccaaaatcttttttaattactattatacacaaattatacattgaaatcattaaacataatcacattaattttacctttttgtcaaaatttccaaactacttgaatattcagggaaatcttttaattttgcaataactgctttttcaagtttatttgcatttttatagaatgttgtattttcaccattatattgtctacaattattgaaaattaacttacaatcataaatgaaatcatccattgattcatatgcatcattctctaatttaacttccattgtacttaagtccattggttctttaataacttcataataatcggcaacttcatctctattaacaggttgtaaaaatggccaatttgatggatgattttgcatttctgttaaaattgttaacattggaatatgatgtgcacccctctttggtttttgagctaaatcatccatttctcttgtccaaccagcttctttgatacctggtatatcaaatggatttaatggagtaaaattttcatttttaaaatgtgataaacctttatgaataacatgagatttacttattgatctaatttttttcaatattgcagctttttgaacagataaaatttttgtactatctaaatatcgaattttaggtaacattgtacattgcattaatgtaccaccttcataatctttaatataacccatccaaacttttttaggtaaagtaatttctttggtaaaaccttgctttttaaaatatccaatagcataattatctgcatatgttaaaaaatatttaatctttgtcgttgctttaatataatcttttaaatgattcattaaatgagcaccataccctcgaacttgttcagttgaagatattgcacaaaagacaatttcagcaaattcatgattttcaaaaggtcgaattgtaataccaccaacaactactaaattatcccttacaattgcaattgataaatgacttctatcataaaccaatctagcaatataagcctttggcatttcaggtaattgtttttgaaaaatattttttaaacctgttaaaacaatcatactatcatgtttatcatcattatttacaacaacaaatcgtattttaccatcttcttcctctaaaactgatggtcgtaccttatatgaataagtgtatccgtcaaattgataactacgcactctacgtttctcttcatcttcagcttcaccagtggtttcatcaccatttttgggcgtttcctctccttctttatccttttcattgatatcattattgtcatcattacctttatcttctgtgacatcatcattgacatctacattacctttatcaccactattatcagtattttgttctgtaactgattccaacttgactttcttttcgtcatgcaaatcctcacttagaagattatcattcttccttttcaccggagtcatgtttccagttgttatgtccacaccagcctttatctatctatatatgttaaatcaacacctttctaacttctcatgcattgaagctgaaaatgaaaattccgagattccacaagcgtcgatacgtcgctgtcttacgtaacacattacgtaaacacgcagagagaagtcaaaaattttttttcacttaatagtaattattagcacttagataaagtgactgattaaacggacaatagaaagtatgcatgtcaaaaaatttattaattaaattatcgatttagtagaattaacatgtttttgatcttgatatcagtcttgaacttctctttagatcttctttcttttcataattcaagtaattgatattcactaattgcattaatcaaaccgaatcaaattaatcaaaaaaattatcatgtcttcaaattctgataatatgattattttacctggatctcaggcattatcaaatttcagagtttcaaatttaatctctgatattaatagttctgttaattcctcagttgttactgatattagatcttgtcaaattcattatattcatgtaaaggaatctttagatgaagaaactattaataaacttaatgttttattaaaatatgataatgatttagatttaaatgatgaaaaaaatcaattattatcaaatttagttaaacttgaaggtgatgatgaaaattcaattactcaattaaaacaaaatttaagtcaagatacttacttaattagaattttacctagatctggtactatctctccttggtcttctaaagctacaaatatcgttgaagttgtcggtttaggtgataaaattgaaagagttgaaagaggtttagcgattcttttaactgtaagagctggtttcccagttttagaattatttgaaaaatcacaattttcatgttttgcttcagtttatgatagaatgactcaatctttatatattaatgaatcaattccaaaattcaatgatctttttgaagaacattctccaaaacctttagtccatgttgatattatttcaagtaaagaaaatttaattaaggcaaataaagaaatgggtttagctttagatgaaggtgaaatctcttatttaattgatgcttttaaaaatattttaaatagaaatccaactgatgttgaattattcatgtttgctcaagttaattctgaacattgtagacataaaattttcaatgctgattggaaaattgataatgaagataaagacatgtcattattccaaatgattagaaatactcataaattaaatccaaaatatacaatctcagcttatagtgataatgcagctgtctatgaaggttctccagcttacgtttttgcaccaaatatgaaaaataaaaatacttggacttcaacaaaggaaactgttcacactttgatcaaagttgaaactcataatcatccaactgctgtctctccattccctggtgcatcaactggttcaggtggtgaaattagagatgaaggtgccgttggtagaggttcaaagccaaaatgtggtttatcaggtttcagtgtctccgatttacaaattccagatttaaaacaaccttgggaattaaatattggtaaaccaaatcatattgcttctccattagatattatgattgaagctcctttaggttcagcagcttttaataatgaatttggtagaccttgtattacaggttatttcagaactttaacagcatcagttaaaaataatgaaggtaatgaagaaatcagaggtttccataaaccaattatgattgctggtggtatgggttcaatcagacctcaattagcattaaaatcagattttaaaattactccaaattctgcaattattgttttaggtggtcaatcaatgttaattggtttaggtggtggtgctgcatcatcagttgcatcaggtgaaggttcagcagatttagattttgcatctgttcaaagaggtaaccctgaaatgcaaagaagagctcaacaagttattgatgcttgtaatagtttaggtttagaatctccaattcaatgtattcatgatgttggtgctggtggtttatcaaatgctttaccagaattagttcatgataatggtttaggtgctaaatttgaattaagagatattttatcattagaacctggtatgtctccaatggaattatggtgtaatgaatctcaagaaagatatgttttaggtgttgcccaaaataatttagaattatttaaacaaatttgtgaaagagaaagatgtccatttgctgttgttggtactgcaactagtgaacaaagattaattttaactgataaattattaggtacaactccaattgatttagaaatgtcattattatttggtaaaccaccaaaaatgtcaagaaatgatttaactaaaacattagatttatcaccaattaatgtctcaaatattaacttaaatgaatcattatcaagagttttacaattacctgctgttggttctaaatctttccttattacaattggtgatagaactgttactggtttaattgatagagatcaatttgttggtccatggcaagttcctgttgctgatgttggtgttacttgtacatcattaggtgatgaattaattaaaaccggtgaagctttagctatgggagaaaagccaacaattgcaattattgattctgctgcttctgcaaaaatgtgtgttgctgaatcattattaaacttagttgctgctgatattaaaactttagatatggttaaactttcagctaactggatgtcatctgcttcaactcctggtgaaggtagtgcattatataaggcagttcaagcaattggtattgatttatgtccagatttaggtatttcaattcctgttggtaaagattcaatgtcaatgaaaatgacttgggaaaagaatactgttatggcaccattatcattaattattactgcattctgtggtgttaatgatacttccaaaacttggactcctcaattacaaaaggaagatgatactattttagttcatgttgatctttctgctaagagtggaaaatcattaggtggttcagcattcgctcaagtttataaacaaattggtaatacttgtccaactgttcatgataatcaaattttgaagggttacttgaattctactattgcattacataataatgctgatgttttagcataccatgatatctctgatggtggtttattaataacattattagaaatggcatttgcaggtagatcaggattagatattaatattaatggtaaacaagatgttttcactgaattatttaacgaagaattaggtgcagttttccaaatcagaaaatctgaatattcatcatttgttaatatttttgaaactaatggtgttacaagtgaatatatttcaattgttggtactccagtctttgatttaactcaagatattcaagttaaatttaacaatgaagttgttattaatgaaccaagaagtaaattacaagaacaatggacattaacctcatatcatatgcaaaaattaagagataatccacaatctgcagatcaagaatttggtaatattgcagataacaatgatccaggtttacaatatgcattaacatttgaaccagcagatgatttaggtgttaaattattaacaagtagaccaaaggttgcaattttaagagaacaaggtgttaatggtcaacaagaaatggcatggagtttccaacaagcaggatttgaaagtgttgatgttcatatgacagatattatttcaggtaaagttacattagatgattttgttggtttagcagcatgtggtggtttctcatatggtgatgttttaggtgcaggtaatggttgggcaaaatcagttttatataatgaaagagcaagaaatgaattttctaaatttttcaatgaaagaactgatacatttgcttttggtgcatgtaatggttgtcaatttttaagtaaaataaaagctttaattaaaggtgcagaagattggccaagttttgaaagaaataaatctgaacaatatgaagctagagtttgtacattagaaattttaccagaatctaatgaaaatccaagtgttttctttgatggtatgaatggatcaagaattccaattgctgttgcacatggtgaaggtagagcacaatgggaaaatgaagaacaaatgaattcatttattaagaaaggattagttggtgcaagatatattgataattatggtgttgcaactgagaaatatccattcaatccaaatggttcaccaaatggtattacaggtattaaaagtttgaacggtagagttttagcaatgatgccacaccctgaaagagtttgtagattagaatctaattcatattatccattagaagaaagtaaaaaatgggaaggttatggtccatggattagattatttagaaatgcaagaaaatgggttgctaagaatgaagcttcagcatgaatgtatttaaataaaatatactattaccactactatatatacacacgtttaccctttgtattttctgtttaaattgttaaaaaaatattcaatatgttataaactttattcttgtaacattatcatcttaacatcaacattaacattaagttgaagatagtctaaaatacgctcgttccgcacttatcgtatagctcgtatagaataaattgcaatttcatcgttccgcgagcttgatatcatacttttcaataataaccgtgtttatttgggcataattattttccaacttttctttttgtaattattgctactattgtaatttattatttattttattatctatcatttatctctttcttttaggttattattattctttcttctaaccagtgaacaagatgagtcagtatgtacataatttataattacaacgtggattcttaatacagaagtaaatactaacattgccttttttcattttactatagagttttcggtttgaattcagttgatattccatcaaaagaaacattttcacaaatttatggcacaattaaggaagtaccaggtttaaacttctttgaaaaaatatgggcatcatattatgtttatatggataatgatatttttgcaactggtttgctgttctttttacttcatgaagtaatgtatttcggtagatgtcttccatggtatattattgatagaacaccatattttaaaaaatataagattcaaccaaatgtttatccaagtgataaagaacaatgggaatgtacaaaatctgttttaaaatcacatttctttgttgaagcattcccaatttggttctttcatccaatttgtgaaaaaattggtgtctcatatgatgtaccattcccaagtttatctaaaatagcaattcaagttacaattttctttttcctagaggatgcatggcattattggttccatagaggtattcattatggtgcattttacagatatattcataaacaacatcatagatatgctgcaccttttggtttagcagcagaatatgcacatccaattgaagttatgttattaggttttggtactgttggtattccaattgtttggtgttattttacaagagatttacatttatttacaatttgtatttggattacacttagattattccaagcaattgatgcacattcaggttatgaattcccaatttctctacatcatttcttatttatatgggcaggtgcagatcatcatgatgaacatcatcatcattttattggtaattatgcatcatcatttagattatgggattacatccttgatactgaagctggtgaaactgctaaaaatactagagaaaataaaaataaatcaaaggctggaaaagttgctactaaaaattaatcatgcatcattcactatataatcataatcatgaattaattcatttttattatagttcctgtataactatcattactacttccatttccaattttactacattccttcactatataaaatttgtagagaaaccctaaaaataagatcaaaccgctactgaaaaaatatttttttaaaccgctgcatataaaaggaggcatgtatccacagtcaatcacttacctaatgacttatttcttttaccagggttttcaggtaaaatgcaggtgcattatacatttaaacctgtcttttttctttatatttgaaacaaaacatactttttaatgatgatatacaattccacagacctgtactgattcttcggaatctgaagataaataattgttgcctttttactgaattaaagtattgcgttgttttagatatttttataactaataatatgtattttacaatgaatgtagtttgcacattgcttgtgataaaggtcaatatcattagatattgttattatcaataatacatacaatttcctatcctaagaaactgctaataaagtatgcagaaataggtgtagtattcttagatcatgtaatctataagaagtcagttaacgtagagactcaactgtgatatgccaaattgttgaatgatttttgaagtgtattatatcagtagatccaatacacttcaaaaatcttagttatgctttaatttaggatttacagtatatttttcataatagatcaaattcaattaaactaataagattgttagaattgtgatatttattttttataaaaaggagattaaaattaattaagatacattaaaaggagcaaaattatttctttgcagttaatcttcttaagtagaaagctaattcttcaccttctaaaatgtaaccatcacatctacctgattgacctggtcttgaagagatagctgcatataatttacctgaaccgaattgagctgcaacagcggattcaatctttgattcatcagctcttgaagctaatttcttttgaactgattttgatctcttgacttcatcaacttcagtagaacctttcttaccaagaactaaaccatagtgggattcgtaatattgtttgaatggagttgcatcaatttgaacaatagcagatttagttaaagtgttagttctaactaattcattgtttgatggatggtagacgacaacattaattctggtctttcttgaaacaccttcagaagcccatgagaagttaccagtttcaactctgattgctctgaatttttggttaccacctctggttctaacagagtgaattctctttggtccaatcttggtgttagcaccttgtctacctaattcaaactttctcttctttctgaattgagctctctttgcaccagtggctgctctcttgtgacgagaatctcttgaaatacccatgatgactgtaataaaaaattaagataaatataataatgataattattaaggaaatgttagtataaaattcttagtgacatcaaaagttattaaagtgttctcattaacattaactgatattgtatgatatatatgttgtagattcttataaacatttgttatatttggtgttatttctttaattatagttgattttaacataaatttaaattatgatatgataaatgattgataatttcaatggattgacggtttgtcattaagaacatttgataacttgattaatatgatatatttaattcatataggtatgtttaatacgtacattattctgtgttaaaggaaataaagtataataggtattaaaatttaaaataatactaaattagaaaaatctattaagtaaaaagtgctataatactaagtaatctgaaaaaaaaaattatcaagtcaacgctaaggaggagattctggaattggtagccccgttgggtttactgggagcaaataaatttttttcagtgggagatggtgcgggtagttggggaagggtaaattttttcaaagtatttttcacagtcacgcagtcacaaaataacgcactaaagatttaatgtcttttacaatttttatgtcacccgcgcacccatcagaaaaaggaaaaaagggctaataagttttaaaatagacctagtaatttacacgtgatattaatttctttttgttttggattacataatattttgtacgtaattaagtttaaatttttcaatttttttttcaatagtaataatggaaaaatataaaaaaacagctaaaacctttaattctttaaaatctttaaaatcttcaaataaatactatatagttctatattcatactatacctaataaacaatgtcagaaactgaaactatctacgatcaaatagaaattgaagactttactttcgatccagatactcaacttttcacttatccatgtccatgtggtgatagattccaaatttcaatttatgatttacaagatggtgaaaatattgcagtttgcccatcttgttcattaatgtgtgaaataattttcgatgaaattgacttacaagaatatcttgatcaaatatcataataattcttttattctcataataatttgataataatactaattattatcacaaatgcaatgatgtaaatagaattgagtttgccattatcatctttatctttactatttttattagtattatcactgttggttttaacattaccggttttatcattggctgcttcattgattagtttagcacgaattttatcttcagggtcttcaatttcttcaagattttcaataatcttttcctgtttgatagctggtttagtaggtgttatacgagtcctcgctgcttgttgttcctcctctgccattttctttaaattaataacgttttgttcccaaatttcagggaatattttcttaaatggaggattagaatatgtattaaattctttagattttttagataattgaatcttggtttgtgtagatgtaactatactaccagttgttctttcatcacctgtcataaatgataataatcctgttataattgtagcaactgaccatgatggattccatgattcttcatgaaaatcactcatacttaaacataatctttgattaatttcaaatctacctgatggtgtacacatcttaattcttggtggtttgaatggatattcactaggaaatgtaattcgtccatgatattgtccattctcatatggtgtacccggtggtccagtaattatataatgccaatctaaaatatttgattcggatggtctagcaatgatatatggtggtggatttgctgaaatctccttaaattctttattaagtctcttataagcttgtgttgacattgtttgatatattatagttaacaaatagtatcacaatcaaaaggcttgaacttcctttgatgtatatatactgagttgtcctttaattaatattatgataaacacacacaaagtcgatcgactatgccttacattgataaatccaataataatttatgcaacatgttttttttccaaataatttttttttaaatttctacttttctggggtatatatagatttaatgcaaaatttaaaatttggttgtgatgtaatataatatattagttaattatgtcaaccgaaagaggattatctgatagatcaatgacaaacaaagaagcaaagaataatatcaaaattttagctgcaaattcacatcctgaacttgcaaatttaatatgtaaaaaattaaatttaccactttcaaatattgaagcaattaaatttgaaaacaatgaaagtgcaattgttgttcaagattctgttagagatgaagatgtttatatcattcaaactggttgcggaggatatgataatttaaatgattatttaatggaactattattaatgattcatgcatgtactcaagcatctgcaagatcaattacagctgttatacctaatttcccatatgcaagacaagacagaaaagataaaagtagagttccaattagtgctaaattgattgcaaatttattaacaactgcaggttgtaatcatgttattacaatggatttacatgcttcacaaattcaaggatttttcagtatacccgttgataatttatatgctgaaccaaatgtacttaaatggattaaagataattataaaaatactgatgaggttatgatggtatcaccagatgcaggtggagctaaaagagttgcttcattagctgacaaattagatacccaattcgctttaattcataaagagagagcaaaggctaatgaagttagtagaatggttttagttggtgatgttaaggataaaagttgtattttagttgatgatatggcagatacttgtggtactttatgtaaagcttcagatatattattagctgaaggtgcaaaggaagttattgcaattgtaactcatggtatctttagtggtaatgcaattgaaagattaaataaaagttcattaaagaaaattatttgtacaaattcaatgcctttgggtgaacatgtaagtcaatgtccaattttggaaattttagatataagtccaactttagctgaagcaattagaagattacacaatggtgaatcaatttcatatttatttaactacgttgctgtatgaaacatccatattgatattgataatgataatgaaggtgttgttcttattgttaaatgttttataaactttttattacaattgtaaaaaaaaatcattacagtattctttactaactcattttatcttaatcttcagcttatatttattatttttattatctttatcctgagttttcttagctaaatcaccccaatatttagatttttctaaatttttctcacaaccaacaccaatttgataaaatctttccattaataacattgccttaacattgtgatgtatctcagctgcccttaatgcccatgcaaatgcttcatcataatcttgtggtaaatttggactaccaacaaaataccatgaacataaacctaagataccatcaacatcaccctggtttgcacttatattataaaaatgaattgataaatcagcattttgttcaacaatatctccaacttcataaaatttacctaacaatgaagatgattttgaatgacctaaattagatgctttaaataataatttaatagcataatttgtatctttaataacaatatctttgaatccattgatataaatcaaagccatttcgtatggagcaccacaacttaattctgttgcacattctgtagcacgtcttaaccaactaatacctttctttttagtgttaatatcttcagggaaactcattaaaccatgaaatgcataaataccatattccatcattgcaactggatgattattcattgctgcaatctctaaatattttacaacttttcttgcatctctggtacatccccaaccttttttgtaacacattgcagttctatatgcactttcagcatgtcttgctttacctgcaatttcaaaatatgaaagtgatttacccagttcaggtttacccttattgaataaaccaacggaaaatgcatcacctaaataatattgtgcttcaatatatcccattttactagattttttcaatgcattatatgcttcgtgaagataagattccttttcagattttgttaacgaaatatcatctctctttgaaatcgcagttctaattaacatttgtgcaaatgaaaataaaacttctggatttttagtttttttagcattttgtctatacatttcaattgatttatccaatggaagaacattaatttgttgtgtagtagttgtatcatttggaaagttggatttactggtatcattatcatatttcacaggacttattgctacttttgtattattatcagttggctcttcatcaattggtgtggtatctttataaacagggtggatgagatttgcaactgattttgtcttttcatttaattggtataaattatcactgaaactggaatcattcaattcttcagcttcaggtacttttatttcatcatgagaacttaaatttgcataatcatcgatatcaaatgatttatcagtagtaattgtattatttgttgtgttattattactactattaatatcttcatcatattcagtgctattatcttcttcagcttccacatgatcaataatagacaatccattagacttttgtttatgactgtgcgtgtcttttactgtatcactaatcatcatctgtcggatactattaatcttactcgtttgtgattggtataatgaaggtttattattgctaccacgttttatttgataaccctttatttccgattcagaatcatattcgttatcgacaacctttgatctatttgatctattacaacttttagattgatgtgatttttgagatttctgagattgagtattaattgaatctaatgaatgtactggactactagaagttgtactacctctcggagaaggggtttgatcattatgaagatcaaaatattttctttgaggagatgataaatgcaatgattctaatgattttgaaacatcatttggcaactgttgtaaaaaaggatgtgccttttttgtccttgtctgtagttgatgatttgccaaaacctgatggggcttaattggatcagctatagtgtcgtttttgccacagtttccacccttctccacggaattcaccggtaaatgcactctatatggatgtgacatggggatatatcgtcttaattagagcaagcaatgtcttttatttgattaaagaaggaaataagtgaagtttaaagtatgtaaatttaaaccttccattacaatcaaaaactaaaatttcagtagacaaagaccatcacagaataaatggaaaaataacagaatttcgagattttgatactaaatctaaaatttaacgtggaagctggcacttgtcactctttatcttttaagtagtgttgttgcttttcacattctgtttggtgtatattgtaccggttatttaactatttacactcttttaattcaacaatccatatatgcttaaacgattgaagtcaaagtcattatccagagataaggataggggtaaagacacatcgaaggattcaaaggacttgaaaaataataatgaacgcctcaatactcttcgaacagtgaaacaatccaatgagcaaaggtccggttccgctaattccgttgcaccaagtgttgattataaacctgatggggataccacttcaaatatttcaatagagtctcataattccaatataagggaatctcaatatcaaaataactcgcaaaaaccaaagaccccactatcgaaatcttttgtggctcaaaactattcacaatcatcgattgattctaacaataacttaaaagttaacgggaatattaaggaacaaaagcaacctaagattgagttgatgaaaccgaaattcacaaatgaacagtctgaaaaattagctaatactgtaattaataaacataacaaaaacttaccatatggagatggttcagagaagcttttcggtatcgaaaattacggttacaattgttacgtttcatctattttccaatgtttataccacactaaacaatttagagaggcaatactacaattcccaacaagggatgaaaataatcagaataatcaacgacctagaaaatttaacgtggaaggaagaaacaaaaacaccattccacattgtatctcatctttaaataacaatacacattctaataccaactccaatttgaataatgatcaagcatcacatcatataccaccgataccaacatcatcttcaagctctaatggtaatgggaactccgttagaaaattgtttagtagatcaaatactgataattcaagcactaccactgttggaacagtaaacaataacgggaactcaaatgataatgaaaataatcataattcatcaaatgataatgacgatattacttatatccaaagtgatttcggaattaatcctaaacagcaagatgaagcacttgaaagaaaaataactaaaagataccccgcatttaagaatcttgaacttaactactacagaaactctcaaagaaatcttactgttgttggaataatcaaagatacaaatgcattattagaatggagaaagaaggcagctctaattagaggcccaataattaatttggatgaaggttttaatttacaatatggaatggaaaatgaaaatatgtttacagttattaaggatgcatttgaatgtattgcagaaaattattctaacacaggtgttctaacaccatttaatttaattgaagttattaaacgtgaaaatataatgttcagaaatgcacaacatcaagatgctcatgaatttttaaatttcctgattaataatatactggaaaatgttaaacttttaaacaatgaaaagattatatctgatacatttgaaggtgaggttacatcagaaacaaaatgtttaacatgcgatacttcttcatatagagatgaaaaattcttagatttatccattgatctggaacctgattcttctattacaaattgtttaaaaatattttctaaaattgaattactaaatgagaacaataaattctattgtgaaaattgcttttcatatcaagaagctgctaaatctgttaaaattaagaagacaccaaagattctcacatttcatttaaagagattcaagtattccgaaaaactaggaagattagttaaactgttttaccgtgttggatatgttaaaaacttaagaatatgtaatacaactaatgatagtgataaacctgataaattatacgaattatatggtgttgttgttcatattgggggtggtccatatcatggacattatgtctcattagtgaagactgaacattatggttggttgttatttgatgatgaaactgtagagaagattaatgaaaattatgtctttaaattctttggtgatggtgttggattatctactgcttatctattgttctacagagaggttgaagatgaagaagaatatatgagaaaacaacttgacattctgaatgaggatgaagaagatgaagatgatgaattggatgatgatgaaatagaggaggaattagaagaagaaaatggtgatatagaaaatgaatatgatacaacttttaacatttcaacggaggaccatagtttttcttttaatgacaccaatattaatgatttacaatcacaacatactacaagtgtagaagaaggggagaaatctgaacctaaggatataatgccagagatgtcacctataaatccttttaccagacagttttccccagttcatccaacaccgttcgttcaaaaggatgttttagaatcaatcgaagatgaaagtcttattaatccattcaattccggagatcaagaagatgcaacaggcggacgtcgaaacagcatatttggatttcgtcgaaaaaaaaattaattgtagctttatcatctatgtgagatgtgtataagtttgtaaccaaatattttttataacaatcaagttaaaaaaaaatcaagaccgtgttacattattgcgtgatataattgattttcatgttaccaattttctgttctaagttccacggatttataatccataactacgttatttcattccataaaacaactatagatctaatacaagatggagatggacttaccatcagctatagctaatgcacaaaaggaacatttccatgcggattggtttttaaaatgtattcattggttactttcccttgcaatactagttatattttcatcgattggtagtgtttattcattaatcaatagttacaacagaagaagtcttattattcaaacaatatcatttgtatactcaataattgattcaatttgggggtatcgtgattactttggtcatgaaaataaaatgtgtcatggtacaggtatctttttgatatttttttatctaacagttttaattattggattttacaatagtaagactaataatagtaataaagttatatcagttacatataaagtattatcatgtttaattgtattatgtggtgttattagattgagtgctggagttgtttcaatgcttgaattctgttatgatgatcatacaggtcaatgtaatgcacatggtattatgggtatgagctttatagtatatggtgtattattatcagtagttttggttgttccatggctaagagtaaataagggtaaatattcacaagaaatgtacgattcaacagttataatggtttggggtgttataaatacatttactgaacatcgaccatgggaaccatggtctcatggtgattatcaacatacatcaatgggtattatattttgggcagctggtcttttaggtatgtttttatctattaatagaaagagaaattttatgcctgcattaacgatgattttaacaggttatgcaatgtcaggacatgttcaagaattaattattagtaccaaagttcatgcattttttggatatgttttaatgtttggtggattagctagaattgttgaaatttcattcttattggatgataaagatgaaagtattgatggagaaattcgtagttttcaatatttaacaccatttgcattaattttatctggtattttatttatgggtgcaaatgaggaacaaatgcaattagttgttaatcttggagctgatcattcatcctatatattaacaattacaagtgcggcaatgatattacaattatggatattagcgttgttgagattttatttaaaacttactgaaactagcaagactaataatagtgcctatgatgatattaatactttagatcactctgatggccagagtcaattcgaacttgataatttcagtgtataaatttgatatgttatgatatactattcaatcattaagtaaaagaatacattctaagccattattagaacctttaagaacatctgtatcgatgtttggcaaaaagaacgcagattgtatcaatagttggcggcttggtcatccacttttctattgttctccaggaaaaaatattttttcaacgcaattttcactcaaattgttcactcattttgaagactataaataaagggcattattttcctatttttaagcttaatttgtcttaagtgtatatatatctttatcttttatcaaacaaaatcaatcaaataaatatgtcttgctgctcaaatactaatactaatactgctgcttccacaaaatgcactaagtgtacattaaacaaatgtgaatgcgaatgtaaatgtgaagataactgtcaatgtgaaaaatgctgtgaatctactaccggctcaggatgctgtgctccaaaatctactaaatgtgctaaatgtcaatcacacgattgtaaatgtgattgtaagtgtgaagacaattgtcaatgtgaaaaatgctgtgaatctactactggctcaggatgctgtgctccaaaatctactaaatgtgctaaatgtcaatcacacgattgtaaatgtgattgtaagtgtgaagacaattgtcaatgtgaaaaatgttgtgaatctactactggctcaggatgttgttaatctatgttttcatttatattctattttctaaactatttaattatataaataagcttaattcttaactgataaagtaaatcaactacctcttgtaaagaaagtatacgtaatcagcgataagcacaaaaaagattaccccaaaggggaaacttaagcgaaaagaaaatttcaaatctgacaaagaactttgatcgaatgaaaaagttcaaattaataatcaatctgatctttttcatctttcattcagtagacaaagacattatgacttctatgctaggtaatgacgatttgaatgattttattaaacctagtgttgcatgtattaaaacatcggaagaggcagtaatacagttagagattgaagatgatgaaaataaagatcaaaaaataattgaagagaaaactcaagttagtatatcattggaagattgtcttgcatgtagtgggtgtataacatcaagtgaagaaatattaatcaaacaacatgatagtagcaagtttgttgaatactgggaagaaaataaaccaaatgataatatgatttatgttatgatggtatctgatcaaagtagaatttcattaagtaaagaatttaataaaagtgttaaagaaatagatgaaataataattaaaagtatgaaaaaaaggtttcaaattacatattttgttggtgttggtattggacgagagattggacattatgaattatttgaagaagttaataataaaaaaggtggtaaagtaccagttttgacaagtgtttgtcccggatggagattatacgttgaaaaaacacacggggatttagttgaacatttaagtgaagttaaaacacctcaatggattacaggtgcattagctcgtgaagttataaagaaagagagatcagatgctaaaatatgtgtattatcattaatgccatgttttgataaaaaattagaagctagtcgtgatgatgttgttgattttgttgttacaccaagagagttgataagtttagttgatttaagtgatattgaattttatcaaaatagtgatgaatcatttgattatgtggagtatgcaccgccacaatggcccgaatttgataattacggctggggaggtattattactgataacaatttactacctgcattaaaaagtggtggatgggcattatcatacattgaaaaagtttgtaaaaaagaaggtgaaaaaggaggagaagaaggagaatgtacaattaatgttattaatggtaaaaatgaagatattattgaaattcaagccgttaaaaaggacggaactgttatttcgagagcaggtatagttaacggatttaaaaatattcaaaacggtgtgagaaaatggaaaggtacagaacgtaaaagaagaggtgttagaggtaaaagtaatagtactagtactgatggagttatttcattaactcaatgggatatggcagaagttatggcatgtcctggaggttgtctcaatggaggaggacaattacctaataaagagatgttagagggattgaaaagtaatgaagagaagaagaactttggggaattgatgattaaatttgcgaaatcaattggagtcaatacgattgagacggccaatgagagaaggagaggcaatacaagtagtacaccagtactcccagatgtgttctctacgtggtaaagactgtgtttagtgattaataatcaaaaagtaacatactaatataatgattcatactcatatatacggcctttgaggaattgctgttttgggacatgttcaaagcaaaaaaatttctattatgtaattactagtaataattaatagtattagtctctttaaatataattttccactttcccactttttgacgtttagatgaaaatttaaaatttactatgtttttccggactggtctgaccctgtattagctagattagaatttcattattaatctaaaatattgaatataatttaaccaatccttcactttcatcttacaagtggtaaattaattatattcactttcttttcaattcatacataaacaaaaatgtcctttcacgataacgctttaattgtcgtttttggtgcttccggtgatttagcaagtaagaaaacctttcctgcattatttggtttatatagagaaaataaattaccaaaagtagtctccattattggatttgctcgttctgatttatctcatgatcaattcagggataaagtttcaaaacatttaaaatatgataaaaataatgatgatcatattaaaaaacttgaaaatttcttaaaaatttgtacctatcataggggaagttatgatgaagctgaaggtttccaagaattagagaaatctattgtaaaattcgacaatgataataaacttgaagtatctaatagattatattatttagcattacctccatcagttttcactaaagttgcaacaaatttgaaaaaatataattacccttcagatagttcaaagggttctgcaagattaattgttgaaaaaccttttggtcatgatttagaaagttctcgtcaattacaaagtgaactctctcctttatggaaagaagaagagttatttagaattgatcattatttaggtaaagaaatggttaaaaatttattacctgttagattcacaaatactttccttatgtcatgttggaataatcaatttattgattgtattcaaatatcttttaaagaaaactttggtactgaaggtcgtggtggatatttcgattcaattggtataatcagagatgttattcaaaatcatcttttacaagttctcactattttattaatgggaaaaccagaagattttacaaatcctgaaagtattagaaatgaaaaagttaatttattaaaggcaattcgtacaattgatttcaatgatgttttaattggtcaatatactaaatcaactgatggttcaaaacctgcttatatagatgatgaaactgttaatgcagattcaaaggcaaatacatttgctgcaattgcattacatgttgataatgatacttggaaaaatgttccaattatattaaaggcaggtaaagcactgaatgatagtaaagttgaaattagaattcaatttaaaaaatcagttgcagatatttatgaaaattcttcaagaaatgaattagttttcagaattcaaccagatgaagcaatgtatcttaaaatgaatattaaattaccaggtgttccaaataaagtttcagtttcagatcttgatttaacttataaagatcgttattcaaaagaattttatatacctgaagcttatgaatcattaatatatgatgctttaaatgatgatcattcaaattttgttagaaatgatgaattagatattagttgggcattatttactccattattacattaccttgaaagtgataaaggcccatctccagaattatatccttacggttcaagaggtcctgaaggattgcatgaatttatgaaaaaacatggttatgattatgcttctaatgaaaattatcaatggcctgttactactccagaagtcttgaataatagtaaattctaagtacatgattatattcccttattatgactactactactactatatactatattttcgtatttgattttttttgtttctcttcatattgtccatttacattatataaaatatagtacatgcataacatcttttaatattccgctttcaattttctaacattaactaagataaacctttacagtaatataacgttctattaaagctgaaagaacaaagtctgaaattttgataacgtggatccatctcaaaatttcaatttcgtgaaattccattattgactttagaggtcaaacacaatagttacacctttcagatatatcattatttacttaaaagccaatgagtgaacccactgttcaacggagggttaaactatatcaactgtctgatgataaatgggttgattgcggtacaggttactgttcaggacattttgttccaaatcctcattttaaagttgttgatgaatcagaacccgataaagtattattaaattctccaataataggaaatacacaatatcaaagacaacaggatacattaattgtttggacaaataatgacggagttgattatgcattatcatttcaagaacctgaaggttgtttagaaatttgtgcatttttaattaacatacaagaaaattgtgaaatttcaagtaaaatttcattaattgcaattattcaaacctcaaatggtgaaactactgaacttatagcaggtcctatgccagaattagctttaccatgtgatgatattaatgtaatgaatggtattttagatttattatcaatcaaagaatttagaggtagaataattgttaaaattttagagaataatgctgtttggttagatgaaatatgtaaattatttggattatttgaatcttccaagtcttttaatatgctctatattttaaatgatattattaaatctttgatatattttaatgaaattgatctttggaatttatttgttaaaaataatgaaatttttgttaagatattaggtatattagaatttgatccagaattacaaggatataaactcagttggagatctaattgggagaagagttatgaagaatcaattgaaattatgaaaactactgatttatttgaaattgataaagaaaataatgagtttaaaactgatgttttcaaatatttatcatttagctttttaaaaaatacagttttagttaaagtgttagatgaaacaaatattaattgtataaatacactgataaatatttctgaattgaaaataatttactatttagaagatcatccagaaagtttagatccaatatttcaaatcaaaccaattacggtgaatgaaaaaaatcacaaaaatgtagaaacaaaacttgaaactaaatcagataaagatgcagaagatgcagagacagatatagatatagacacagagaatgatagcaatttaaagatatttcaacatataaaattacttcatagaattataacgatttcaaagtttgtacaaaattttcaaagaacttcattttatacacttttaatatccaagggattaattgaattaattgaatattcaataaaaaacgcaacagatagtactaaaattaagattagattacttatcactgaactaattataattattgttgaacatgatatactacttttcaaaaattttaatcaaaatttacttaatatacttataaacattttcctaaaggatgataatataatattgaaatcacaatcatttgaagctattaagatattaattgatcctatgaatatgagagagagtgcgattgaaacagatgaaattgatgatatttttttggttaagttttatgaggatccagcaaagaaactgtttagtccattaattaacataaataacgaaactgaagctgaaaaaattgattggaatcaatcatttatattagaaaatattatcagtttacttgattttatttctaaaactcacgatccaatatacagtcggtccttcattttagagaatcatttactaaaatcagttaatagaataatattaaatttagatagaaagtttaagcgtaaactacaactaaactcaattaaatgtttgaaaagtgctgttttatcaaatgatgatttttacactcattacataatagaaaatgatatatttaatggatttttcaaacttttacaatcactgaaagatatagacaatttaataagttcacaatgtgaaggtcttctacaaaatatagtagaaaagataaacgatgaagttgatgaaaagaatatgaaacttattgcagaatactttattgagaattttaaagatacattagctgatacggaagttggtatgagtttgatagatgttattcagaatagagattcatacgatattggtgatgatacagttgttatatcacataataccggtaatggcaatggcaatggcaatgaaagtgaagaatctaagatacagaagagacctatagaagatgtcctggatgatacggatacaccaccactcatttctgagcccaagaagagggctacatagtgataaaatgtgggaataatcgatgatagaaaaatcaatatgcggggctcggctaaaatattttcatcaactccgattttatgtcatacattaaaaacacggtttggtggtataaaaggatggtgttgtgtctgtttgttcagggtaagttgttcagtattggtttgtttcttattcttgtatcataatcaattaacaatggaaaattataattacaataacgtgtggaaggaagggatttttgatgggaaagtgtgtttgataactggtgggtcaggaacaatatgtaggcaacaggctgctgcattaatgaagcttgggtgttcagtaagtattataggcagagatcagaaacaagtcgatgaagttgtcaaattgttaggcaagataggtaataaaaatgcaaaagtaataggattaggtggttgtgatgttcgaagcattgattcaatggtatcagttgctgacaaaactgtagaaaaattaggtaagattgattatgttatttgtggtgcagctggtaattttatgtcagactttaatcatatgtctgctaacgctttcaaaacagtagttgatattgatttattaggctctttcaatacagttaaagcttgttaccctcaattaattaagaataagggaagtgtaatttttgtttctgcgactcttcattattacggtgtaccattccaaagtcatgttggagctgctaaggcaggaattgacgctttatctaatgcattagccgttgagtttggtccaattggtgttcgttgtaactgtattgctcctggtccaattggtggtactgaaggttttagcaaattagtacctaataaggaaaatttcgaatctaaaataccattacaaagagttggtagaacaagtgatattggaaatgcaactgtatttctattcagtgatgcagcagaatggattactggtactgttatgatagtagatggtggattttggcatatgggtaactttaatacatatgatgcttaccctaatgttttgcgtaataaattgttggaaaaaccaaaattatgattaattaatgattgtatgtattatgttatgtatttatttctataaaattaatgtctattcttcaaatctgctggaaaaacttttttttactagttgtgtttcttctccaactccttcttcctcttcctcttcagtgtcagactcaaatctggatttgaatgacttttgtttagattcattatcatcaacatcatcttcactaacctcgtcatcattttcatcatcgttctcctcgtcatctatttcagccttgctttcaccttctccatcattttcgtcatcatcatcttctaccaatgcagtaataaaatcattcttaaaatcatcaatttgctcttcaatttctctttcatcatcaggaaatacatactcgatatattcctctttaagtccactttcctcttctttaaatttacgaatcatcttcggtaatctcatctgtacagccttgattgattcagaattaccgtgtttttcttcaaaattcttcaatgattctaaaagaacaattctattttgaactttagccttatctttcattagtgatatgtactttgagtattgatccctagtattatttttaatattgtcgttaatgtctatctctgttatttcttctttttcaatctttgtaatttgatcttcacttggtatacgtagttctaatagacacctttgaattatgtaattcacatttgaatattcagtaagttcaatcttataatctgaaagtttcttggccaacgtgaaattgtatccttcaattaatttattcataacagaatttatcaattttattttacttttattattcaaaaactcgttggagattgcaacatcaacaatactatagcttctatcatcattacccaatgaatcctcaaattcaaaatatgttaaccaatgtttccaattactagaatgaacttcaatcaatttattatacaattttctagctcgttcaaaatatttaagtttaatctccatattaatatagtatagcataatttcctcgtttgatgtaagtccaatactctgtcctaatatcatacgcatttcatccaatccaaaatttctcagtttaaattcagaatacttgtaccagaaatcaacaatggtgaatactgaatgcggtacaattctcttaaaattttcatagataagagtagctgcttcaatgtttttgttgtcaaattccagccataatgcaaacctatagttcaggtaccaatatgtggtccagttatttgaaaaaaaattagaatcaggtataacagatattgcagattcaaaagatttttctatatcttcttttgaaatttcaagttcagagtctagtaataagttgagataagtccaccatgtctcataatttgaaggattagattgtaattgttcttcgtatttgagtttacgttttttcaaaactaaactttcgatattttcactatttacaccatactgtttttcaaaatcaacttgaaacttttgtagaagtttattttcttcaggatcaagacactgaaatccaaattcataaagttttttcaccttttcgtattttttgttataaaattcatactttatccatgatatcaaaaacttggaacataatttttgtttctcatatagagagttcacacctagtttataaacattcaaaacattgatataatcgccgtattttttctcaaattccacccatcttagccatgaatcataatcattgtacactaccactatcttttcaaataacaatctctccttactatactctttatatcgttctaaaaattcaacatagtgaaaccaaacatccttaattggtttccattgtaaccacttttcataaatttcactcactgctatgacatttcctatagattcttcaattgttaaatacatataccacaacttatcaatacgaggtaaaagtttggtagctctttcaagtaaatttcttgcatgattgatattcttgcttttaatttcagattgtatataacgtacccacattgtaacatttttataatcgacttccaatgcacgttcaaagactgatctagctcttcttaaatctttttgatcaatttcaaattgggcataacgcatccattgtccataattgaatctattacgtcgtaaagcattttcatattcagtacgtttacgtcgctgaaaaaacagaagttcttctagatctgctattttataatcagttacttgaagttggttttgacttgtctcatatgcagattttagtaaactagatgctgtaaactgtttctttttttcatttcctaatattgaaccatcatcaatatcattatcatcgtcattttcctcttcaaactgtcgtttactgttattcgacattctttttggtgagagtttctaccaataatatgttgtctccgggagaagaaaggaaatttcaagtaaaacaattaaaaaattatttaaaatttgtttacttaggcggaatttcaaatttttgtttttatacacccttcattccagttcgtgtttctctgattactgaccgatctgtaacaacacaatgcccagcttcccgatactggaagatataaatctattggtagtaaaacatccaaatgaaggtcctggaacggaaaagtcttattccgatttgaaaacagcttttgattcacttataagtttaaacattgataaagtattccagatattcgattatgaacaaatcaacgaattgagtcctcaaaaactttcacaatttacacatgtgatttcagatagaattgaatttccacaatatgaagttataactagaaaattaatgattccagttgtttccaaattatggctacgaacggttataaagaataaacacgtcgtgccaattagaccattctcaccagatccaagacatatctttaaagatttcactattagctctcaagatttaggaaatgaagatgattttgaaattgttaaagttgctgttactgtttttggtggtagttatattgccgatttgaagaaatctctgacacatttggtgacaaataaatcagatactgatagtgttaggctggtcaatgcatttaacaaagttaatgtgaatggaacacatattcatatagtgagaccagactgggtttttgattgtttgcgtgctggtaagttacttcctgaaaaagtctacgaagttacagacgatatcaagcgtaataatattttatctgattatgctgatcagtatctacctaaatttaattttgaattttctaaaaatctgcatatatcttcatcaatggtcgaatgtttaagttggatcaaaactggagataactcatctgaatttgagacaattgtgttatcaaggtttttagaaaaacatactaaaattaaacagagaacattcgactttttgtttaatttgtttttttacaaaagtgatgatcttccaaactccttgctgttttatcctgttccaaaattgaaaaacaaagagatggaagaagcaattgtagcaatatctaattataccggtgatgcgagattatatattgaagagttacttcttagaatgggaagcaaatttaccaaaactttgaaatcaacaaacactcatttaattgcatccaagaaagttggtaaaaagtatgatttttccaaaaaatggaatgtgagtattgtaaatcatctctgggttgaagattgcttcgttaattggaagaaaatggacgtttcattctacagtaatttaccaagaactgaagaaaatataagaattatcggagatgttgaatttctaggaacatttgttgaaaactctaacaacgatgagaacttagccgtaaaggaaaaagttgacgaaactaaaaccacagattctaaggcaaaccctgaaaaagtcaaacctgtgaactcagaaaccaacaaaaccaccaaaaaagcgatcaccccaatagtcaacccaatagagacaatcacaccagttgaaattggaacagagaagaaggaaacatctccagaagtcgaaaaaattgcacttacagatactgaaaaacaaacagccgatgaagtttgggaaataccagatgataaaataagtacagaagagaaaacggaagaaataggagaagaagtagaaccaaagaagaaactcaagagtacaccaaaagccaatccaaagaaacgtcaagtagaagaagataccatactagtgaccaaaaaaccaaagtcttcctttaagaccaaatcaaaaacggataccattgaagttattgaagctaacgaagatgctaccaaatcaaatagcaaaaaagctgcggatccagcccctaaaaagagtaatggaaaaccatataacatcacagctatcgtaactgggtttgatggatcattgtcagctggcgataagagagaattgaaaaaagttggtattacaatcattgaaaatgcaaataagaacctgaattgtattatagcaccaagtttactacgtactcagaaatttctgacatctttatcatttgatcctgagtattttcttgaaccgatatttttgaatgatgttcttggaaccttagatagcactaaaagtacgagtgaatttgaagcaattgcacctaaagtagaaagatatgatatctggaatggtattgattatgaaaaagatataaaacctaaaaatatttttcataaaaatattacaaaatttgaagcaatgaaattgatgaagaagagtaaatcaagtttattcaaaggttattcattcaatttatcatcggggttagccggtggctttgatactttaaagctaattttaaaatcatttggatgcaaatctttcagtaattttaaagaaaatagtaaaaccatgactgttaatactgaaaaagaaatcagtggaagtaaagaagtagctattttaattagcaatgaaaatgaaacgaaattacaagatcactttatcgccaaatgtgttgatatggacgtaaattatgttattgttaaatgggatgtcatagtaatggcaatttttgagggtgaattaaagtttgataatctagtaaactcttcttttaaatagaatgtttattatatatgtatattagcttaacatagattcgtcttcaggaacttcttctgcttgatcgtccccgtcgtcatcgtcatcttcatcatcctcttcgtcatcatcatcttcgccattgtaatcaccatcatcctcttcatcatcttgtaccatttgaaattgattataaaatagattattgctatagctgtttttctcaaattcatttcgtgttcttttctgtgacgatgaaggtaattgtgaaggatttgtagagttataataatttaacattgaagcaagatcggttgtatcatcatttggagttttatttgcacgaggttgtaattctgatgattggctattgttgatattaattaaattcataatggcagtttctgactgtcttaacaaatcatctggtgtttctattctcatggtatccattctggttgcacttttagcattttctggtgattgattccattgattggatagcattggtatgtcaaattgattagagttaactttttgacgtttgttactattattttgagtaatttcattattagtagcaattgtattatctctagtagtggtgttattattatcattatcatggttggtgatagaagtattattctgtgggatttgatttgcagattctgaagatttgtcctttttacaaacttcacattcatcaacaaccttcttaactgtttgttttattttactccagtagtaactactcgatagtttcttcgtagttcggttaatacccatatggttttcttcgtgtatcttctttgttatacttatttgatcattagggttaaatataacctgtttatctttcaagaacaatttattatccacaacattgtagtgataagccaatgctcttaatcgacttcgatcatctctagtagaattttctggatatttcccagataataaataaactaaaatatttgcatgtttggaaacattcaaatcgtcgtttataatcggtaaatctttagtataaatcaatgaatttatcagcaaatcttttgttgattttaagattgcacaagcattgatcttccctaccttgttaaacccacatttctcaagtaattttttagctcctatgtttgtttcgaaaactaattcaataatacaccggctgtatcctaaaatcggtgcccatcttaggaaacattcacataggtaaaatcctattcgatgtcttctgataccagcattcactaaaaagttggtggtacatatatgagcacatctacctgggtaagctgatttaatgaaaaacgtacccaaacaattctttgcccaatcattagtagtaaattcttcatcagcatttaaagtgggttcatcaccaatacacattattgctataaaattggtacaccaataattttgaaattcttccagtgacaattgatcaaagaatggtaaggtatcacctctattcacttcatcattatattcttgatgcaaaaacttcaataaatttgatggaattgaatttatgttaaaaattggatatattgttgcagtggtatttaattctttcaaatggatggtaacacgctcgactttgtaaggagtgctataatgaggggtgaaatgatttcttgagaacccaacatcattgtatccactcatctttgccaaagaaaagaagtattgataccaatttgacatggaattaagaattcaaatcaaaattcatcgaaatcatgcataactttacgcgtaacattaacattacaatagagcatagattttgatcaatatcctacaaaaaaatgaaatcaatttacgttattaaattaaataaataagaataaatatataaaatgtgtagataaatgatatagaaatatataattgaaaataaatgataataaaaaataaatgttgaataatgaagataaataattaaaggaaacaaaacatgtattgtacgaaataaatctattagcaaataatgcagatgaaaaataaacgttttcttttattttaatgttaaaaatcaattaaagatcttgcatgttggattgagcaaatggttggttaaaggactgattgaatgcttgagggaattgttgattaaattgattaaatggttgggtaaattgttgaattgcttgaggttgtggggcttgttgttgttgctgttgttgttgtggagcttgttgttggtgatgattttgttgttgttgttgttgaaattgtggttggttttgattttggtttggcaattgttggttattacggttaacaaaatttctgtttgatttaccccatccacattttaatggtcttccattaattgataatcccgacaattgaacaattgcaagtgcggcacgttcgtgagtatcataggtaacaaatgcacagttcttttcactgataagtttgaagttaacgataaatccaaaattttgtaataatggtatcaaatcgttttgagaagtgtattctgataaattacccaaatagacaacggaaagccaattaggagtctgtctaacaacgatatcaaatgaattattaggagattgaagtggagattgtccgttcatgacaggggtatttaacttattatattggttgtaattattgttattattattattattattattcataccattattgctattattgttaccattgttattaaattgattattgaaacgattattgttaaattgattgttgtattggctattattttgattgaaagagccaaaattatttgaatgattgtttgatcgattcttttccttatgtgatgcccaatttaatctaataggtctatcacctaaagtaataccattcattttatttaaagcattttcagcatcaaggcgatcactaaatgatacaaaaccgtaacctctagatctacctgttttcatatcccacataacattagcgtgaattagagatgggaatgatgaaaaagcggagtttaaagaatcatcattgatttccagggataaatcaccaatgaaaagattgaaaacaggtgattgattaccactatctgaatttgaaccatcttcaccatttgaattgttagaagaggaatattgttgagtatggaaagccattgaaacattgagagtaaatccacctaatgttgtattagtgaataatggtaatgcagttgcggcatcttcagggtttgaaaattcgacaaatgcatataagaaaccaggtctgtttttatcatgaagaattttaaatgatttaattggagtagatggggaagttgagacaaaatgatcatgcgcttcaggttcagcaattgatgaagggatgcctgaaacataaataacagttttagaatgatctctaccaccagaagttgcagttgcggttgcagttgtagatgcagcggatgttgttattccagaagcttgagcggatgttgttattccagaagcttgagcggatgcatgaacggattgagttgctgtagtacttggaacagactctgcagataaagaaggtgtagctggtgtagatggcacttcagaatccatgttagatgtgtcggccattgcggaatgtctggtgatataacaatgtaaacaactaaaagattgtgtttataatcaacagaatacaatattgaaatttcacatcagtcatagcaggtataaataatattattgcaaacaccggcaaattattacgtaatcttccacagtaaaaaaatttcacttttcttaacattaattgttaactttaagttgttctttcattaaatcattgaactctttaaaagataatgtcattctatttgcgtctggggcactctacagactctgcttctgaattattgttgaaattacagacttcattgactgcagcacatggaactatgggtcttgcagctgttgtagactctgatatccttacatggtcaccaaacgaagcaattttaaagattataagttctgatacaagcctttttctttctggcctagcaactagtgaaatacatttattggcgtcaagtgcttatctctctgtactaatcaattgaagtattattcttaaaattatgcaccctcttaaagataaatgaaattgaagtaccattctatcagttatatattgataatatactggtaatgaaaatggattgctggtagtatatacggtatagtataatgagaagcaaaagaagaagaagaagaaggtaataaactgatgagccgccataaatattttcttctttttatacctttagcataggttgtatcaattagtttgtatcactgttttcaatcaatgaatagatgatgacatgtatagtactgtaatacatatatcattatactactattagatagccctgtatattcagatacaagttgtacgaacatgaactgcaactatataatacaagaatcagacgcatcgacgtgctcactactataataatcaccactataattaaagataaatgacattaccatcctgttaagatggctaaataataccgagatttatgttacttgattatcaaagctttacattctgttaataacacacacaatcatgcgtatattgcagcttgtatcgacatttatttgcttgatatgttggatagtccctgcattgacagcggatataacccctccaaagataagtatctccaaatttccatttattcataatatcttacaatttaatgattcaaatactgtgatgttacgttcatcttcatctatatatctatctaaaaacaacggtgctgattgggaacaattgccttttaaggatgatagcggtaatgatttagatattgttttattacaggaatttcaagatttcaaaacttttgctgttgtattcactgtaacaggtagaacattttatacaactgatagtggatccaattggaatcattttgatgttgatataactacatcggatactaaaaatgtggttgtttctgcttcagctcaaatcaattttgctaacacgaattattggttattcgaatatgaaattattgatacagaaaatcatcacttatttcaaaagacattctattcaactgataatttaaaatcgaatcttgttgaaatgccattaccaaatactggtaattgtaattttttaaaatccaatccctattttaaaaatgctaaggatgaaacaattatttgtataacacatcaaaaaaattattttggtgctattaattctgatcaacttatatccactgatgatttctttaaatcacataaagaattatcaatatcttccatgggtggtaatgctcatattttatcaacaaaagtggtcaattcatttatcactgtgatagtaaccacaaattcaagaatgagacattccgtactattatacacttcaatcgatggtatacactttgaaaaggcaaaacttgatggccaagaaggtaatagtagaggttatatgttcagtattttagactcaccacagaataacctttatatctcagtttacaatcataagtcaaaatcaccatctcttaatgttgaagcttcatcttcagtttataaatctgactctaatggtgtctattttaaaaaattattcgatgatgttttttctaatctcttcggtatgtctttaatatccaaagtagagacattggatggtgtttggattgcatcacataatgttgtttacaataatatgcaattacctgactcaaaatcaatgattactttagatgacggtaaaaattggcaatatttaaatatcacagactctccaaattgcttaaatgatgatgattgttcattacatattgcttgggttacacaacgtcgtggtgatggtcttttatcaacaggtagtacccctggtattttattaggtgtaggtaatgttggtaaataccttgatcattcagttgataatttgaaaacttttctttcaagagatgggggtgttacttggaaaaaaattaatgataagcctacagtttttgcttttggcgatattggtaatattttagttacagctgatgttgatttggagtactttttaaccggtaaattagaacatgctactgattccttttcatattccttagatcaaggtgaaagttggaatgaatttaaattagacgatcattttattcctttgttttttgttaataatatagataacactgataaagttttcattttaaatggtatttggaaagaaaatcccgatcagcctgagcaaaattccattttatacacaattgatttttctgaaacttatgatagaacttgctcagataatgatatggaagaatggttagctagggttaatcctgtgacaaatgaacaaagctgtatttttggacattcagagaaattcagtagaagaaaggcaaatgctgattgttttgtaaatagaaatttcagggatattgaagtaatcgaaataccatgtgcttgtacaaaggaagatgaagaatgtaattttggttttaatcttgatgaaaataaagagtgtcaaccagatttgaatgtattacaaacttattgtattgatgatccaaacctaaaagaaatgaaattgtcaaagaccataatcccagaaggtaatatttgccaaggtggttttaagcctcctgttgatgattatgttttgaaatgtaaagatatagatctatcggatgatagtaaggtcagtattgaatttaattcatttggtgaaaacattctatactatcaatatcttgaacaaaatgcaactagttcagaactccaagatgaaactctaattgtcctgactgcttcaagaaaggcatacatttcatttgactctctgagtttcaacttattagctgatgaaaactttatttacatttttactaatccatactttcctgattcattttatttgatatctgatagcggtgaaatttttacatctactaatagaggaaaactcattaaagaagcaaaattaccacatgtttcaaagggttatagttcatatagtatgaattttgataaatcatcaagggatacgtacatcttggtttcaaacgttgattgcgattctgccaacaattgtaagtcatatgcatctgtcacagaagataatggtgaaacattcaacgatttaatatcagatgttgttaattgtgtttttgctgaaagtattttcaatgctgaattatccagtgaagtcaacccattgcaaattatttgttcacaaaaagttccagatcaaccatactatagattaatttcatcttccgattctttcaattcagagccaattgttcattttgaaaaaattataggttttgctatgaccggtgatcaatatttagttgttgctacattgaatgataataatgatgatcaatcattaattgcttacgttactgttgatggccaaaattatgctgaaatgaagttcccagctgaaactaacttaaatgctcaaactgcttacactattttagatgttaattcaaacgaacttttcttacatctgactgtcaatgattcccctaatcatgaatatggttcactattgaaagccaattacaatggtactctattgaccacattatcagattttgttaatagaaatagagaagcatttgtcgattttgaatattcacaaaacttggaaggattgatcattactaacgtcttgattaatccaattgagaaagatgataagaaacttgtttctcacatttcacataatgatggtgcaacttggtcattgttaccaccgcctagtaaagattctaatggtaacaatatcaattgtaaaggatgcagtttacatttacattctttcacagaaagattagatcctatgcgtgattctttctcctctggatccgctgttggtttaatgtttggtttgggtaatgtcggtaccagtttattaccaattgaagatgaaaacttatcattatttttcacaaaggatgctggtattacatgggttgaaattgcaaagggtaattatatctgggaatttggtgatcatggttctattttagttattgttgagacgcataagcaaactaataaattcaaatattcattagactatggtaacagttgggtagaaaaacaatttactgctgatgatacaacttacttagttgaagatattgctactgtcccatctgatgattcattaaagttcattttgattactaaagacaataagaatttaaacaacattttcactttagattttacagctatttatccaaggcaatgtaatttaccatcagaaaaggaaaagatactggatagtgattttgaattcttcaccccaaaacatccaaatttgaaagacagttgtttatttggtcatgaaaaaagttaccttcgtaaaaaggctgatagtaaatgttttgttggtaaatcaccaatccaattaggttcagtcattgtcaataactgtaaatgtacaagagaagattatgaatgtgattacaattatcagttggcaattgatggtacttgtaaattggtaaagggtttaactcctgtcaaccctatagaagtatgttcaaaggaaaatgttgatgaatggtgggaacctactggatatagaaaacttgcattatccacatgcgaggatggtttacttttagacaaaatagacagacatccatgtccgggtagtaaatctgaacattccaaattaactggatgggttatgttttgggttatttttattccattcttaatatttgcagtaacattagttttggtctatgaaagaggaattcgtagaaatggtggttttacaagattgggtgaaattcatcttgatgatggtgataatttacaattggttgaagaaaatcgaattgataaatttgttaatcatattgttagatttggtgtttttagtttccatatgttagctaagggttggttcgtcacatcaaatatgttcagcaccattttagatagaaacacaggatcagaatatcaaaatactggatcaattggtgcttttttcaatgatatggttgatgatgatcattcactatttggtgatcttaatgatgacgatgcaagagaaattgatgatttcttagggaatgaatcagatttcaatgcgaatcgtgatgatgattttgatgatttcgcaacacatgataatgtaaataccccttctggatatagagacaatacggaagacgatgaaatcactgatgttgatccatccagatttcaactgagtgatgaagaaaattagttatatgggatgtttcatattcagagttgtttatactatatacatttaggtaatattttttgtactttaaattagattgctatcactatctaacactataatatatatatatatatatatatatttaaaaaaaacgataaattaaagataaactatattttttattgtccatgaaggtagtttttcaaatttcaaagtgaagatcaatcacagaattcctgttttagcaattgatacaggtaaatttataggtttcagttatatgatgcagcaatgtatggctgtttgaaacatgaaaaatcgtgttatcactccttgacatgtaatcatccaattcctttgcattcccaatcaagcaattttttgataaataatcaagatttgtaactcatctagctgctttcagattggtactgaaactatcacatggaatggaaataatcaaaaaatgtgatataaagcaggaattgatatctatataaaccataaacaatccactttgaatagttatcatgttaattcattaagaagaccaagcaaacacgaatgttatttaacaaacttaccaccacattatctgcacttactgcaattatcgttccatttacacaagcaactgttgattttgagatctctgttaccccagataacagaattcagattgatgttccagcaaattttccatcatttagctatattgcaacattacaacttaattatcccgaaacatttgcatggagtgattccggtagtaacttctaccaatgttcatcaaacacggaatgtgaaccatttgatacttcagatcttgacatgggtgacgatacaccatatcagttttatggtaaattatcaaaaaatgcagatgatggtaaatttatcagatttttaacacctcaattagcattaccaaaatatggtgttgttccagtttcatttgcagttttagttatgggtccaaatccattattagcagaatatgctgttactatctatcaattagatcctgcctcgagtgatgcatatacttatattccaacaactgcttgtttttacaattattgtgcagaaactagtatccccgaattaaaacaaacaattactagtatctctaatggtgttacccaaactattttaacccataaatctatatcatatgagccagttactgtgaaatcctatcaaactacttcaactattgtttctgacggtgttaccaaagttatcacaacttactgtccattaacatcaactcaatgatgctttttaaaaatactttaagttattttttattgtttattttatattatttataacatattgacatctagtataatctgtctggtatacctatgataaaattccttctaaaaagaagtctcctcagaagtgtagactctccactagaattaattcatgaagaaatcaccgtgagaaatttgacaaatttcagtaaagccttatttttcatgataccagactgattaactttctttacatagatctaatattaaagggtatattctatcaaaaacagtagtattcgggggatatgatgatgatgatgagacgttggacagttaataatggtcttttaagaagatcatttactagtagtatatcgagctacaaggaattacctaggccatccgagaaatatatggctgatatgggagaacaaccaattccattaacagagaatgatatgaaggctaaagatgttgaagacattgtaataccagaggcaacacttgatgaaaaggcagaaatcaaaaaggcaatgaagaagagatcacttcgaatgacattctggcaattattcctagttactttattaggtagttcaacattaaatattatgagagaaaagaatttgaaagaagaattagatgaaaattttgaaaagaagtttagagtattgaataaacttattaaggatgctgaagaaggtagaataacgacagaggaagcaagagatgctatgaagagttggaatgaacgttttgttgatgtattccaattaaatcctgtcattgtggaaggtgttgatggattagataaaaagaagttaagagaggcattcagtaagataaagaaaattgagtttaatgagaatgattcaatacatggcattgatagtgaaaataatgaaaccaagaaagaacaattaaataagtttttataagtaaaacatttgtacatattatttatcttaacataagatattcccttagaatatatacctataccgtttacactgtaaaggaggaattgaatacattaaacaagtataatgatacatgcatactatacaaataaaactaaccactccagtacctatacaacataggagcttcaaaactgataggttttattgattcattggattcttctgttgatgatgaatcttcattttcttcaattatattgagttgttttcttggaggcttataaagtatatttttggattgggatatgagctctttaattttattgacgtttaattgactgtaatctgatgttgattcaataattgaaattgcttgaagaagtttggaagttgcagcattattgtacttaaaaatactcaatttttcctctaatagttcaattgatttcttttccaatagtttcttttgaatttcaaactctttctccaatgagtttagcttcgagactttcatgtctactattttcaattggtgctgaataatatttactaatgacttatgcatttctctctcttcaaatgtggcaaataaatgtgatctagcacctaatataccaaaagcattaacagccgcatctttaatatcaaccaatggatctcttgaatattcttctttatcattatcatcacatacattggtttcgttaacttgtgtcttagtattatcattatctgagtcttttgtagtcaaatctgtatttgtatctatttcattacctttattatcggtggtattcccaatctcaactgcgggagtttcagatttaccatcccctgctgaaccattttctttcttttcctcttcaattgctacattattggtttcggtattttgattttcctcttctttaacggatgaaactatattatcagctttaccgttattcaaagcaggtttttcttgttcaatcgttttttcaaaaccttcctgtgtatcattcttggtatctttttctatactagtttcatttttttgatttgaacttacagtttcctcagctttttgtttatgtgaaccatttaatttactttctatatttttattaacaacatcaattgctctatttgatgctgcaactgcaacatctgaatcaacaatgttcactaagaatgcaagagttgacataattggattgtcccttggggagaatgataaattaggaacatactttaaaggacctaataggtctttgttttcttctaggaatttatcttcaattggtaattgtaaaaatctaataatacattcatctggagttttattatttccagtataatctgcaattttataccagtcatttttaaatttagatacaccatcaattaatctttgtaatgcatcttcactccaaccattattaatatcaggttttataatttttcgtcttttatttgatggttcaacttgagtattattattagttgtctcaatatcaaatccttttttaggagctaaaatttctttaacattggatatatcaggaaaattagttggaggtttataactttcaaatgggaacatacctcttggggtatcaaaatctactacaaaatcaccagtaaaaggaggttctatctgttttggttttgtttctggattaacttgataatttattaacccccatttatttaaaaacttatgtatacgtaataaagcaccagcatcaccaattaaatttcttcgaactgcagtaaaagataaatatgagtttggatttattctataagaatttatcataaaatttctgtatttcatataaatttcaggacttttatttttatttatcccttgaaagaattcagaaacagattcaatttcaatttgatgaactttattaaaatcaaaccatgaagaatatgatggtaaaacaattgtatgagtctgtctttcaagatttgattcaacaaatgttggttcttgtttattatcaattggttctttccttttcattttctttaatttgccaattgcattagttatattatcaccattatcattgacatcactagtatcatccatgtcaacatcaccatcgacatcatccgcgtcaccatcatcgttttcattaaagtctttataatccatatcatcagtttcatcaattggaggttcaatttcctttttctccaattcactactaccttcatcatctggatttttggatggtgattcatccttttgttcaacaacgggagtattcttttgcacgtcatcattcttcactatggtttctttgacggtatcttctaattttatagaatcctccactttcaaagcttcactagattcttcctttactttttctatttgttcctgtcctggcccttgttctgacattattaccttatggacagtgtgattattggacaattaaactgtacaatcacaaagacaattcaagattgatgttaatgttattagatgtaaattgctatagaaattgaaattttgtaaacacgtctctgcgactgattttaatccgggtaagtcacatgtcaaattaaatatcatttcttagtgaaatgtatatagattaatgctgttattagttaaatgttctttagaaagtatactgatttgaaagataatgggtgtagtgagaggaatattgggtacatttgcaaaggggacggtggtggttacctcatttggattgggtttggctctatttgctcgtccatggcctgattcacctatttggacaaaacctagagaattggtacagcataaatcattcaagagcaacctttcaattagtgaacaatgtgcaaaattacaatcatatgaacattttaaagattcttccgtatttcaaaaatatattaatgatacaagtaaaaattatgttttatttgatatggaaaaattaataccagctgcacataaatataatcaagtatcaagaggattactaaatttaaatgatccaatagtgttgattgacagaaaggagggtgaacttgtacttttcggtaaaactgcaaatgctgacattgtagggtttgatgggaaaatccataatggtatagtacttacattattagatgaatcactatgtttctgtggatttgataaattaccaaataagagaggtgttacagcaaatcttaatgttaattttgatggtaaacttcaaccgaattctacatttatactaacggctaaagtagaggatgcaagaggtaggaaagttaagattaatggtgatattaaatcattgaatggtgatgcagttgctgatgcaaaatgtttattagtagaacctaaatggttcaaatggcttacatgggttgatctcttttaggttagactagtatattatacctatatcttttatatatcttaatgttaatgttaatgaaagtaaatatacccgttcttacataagcgcatgagatactaacatgccttaatgtacaaatttcactttaacatgggtgaattgttagttcagtttctttctggagacactgcaataatcagtatgaacggtcctgatagtagcctagaggagactatgttctctcctaatgagaataaactttcatttcaacaggaagaagaacttaaaagacaaaatatactagatcaatataattttaatacggttaaacaagttgttcaagataatcaatctagacctgtaaatataacaaactttaacatagttggtacggacggtaaatatagaaactcctttttaaaagcacagcttgatccaataatatcacaacttaatgataacggtagatcacttacattctctcaactattgaaaaggattgatgatgtaaatttcaatcttttaaagactgattcaatttcaaatatgggttgtcaaattggagtacctgaaaatcaaccatataattactttaatcctgatttactgaatatttttgtaaatttgcaagttgttccagtaaagaaatttttccttaaaattggtacaaatgttggtaatggtgaaggtgatggttatgttaaattacaatggaagaatatatttggaggtggtgaatctttggatttagatacaaatttatcctctaatgaatttaaaatgaaatcaagtaaatcacaatacatagtaaactattcaagtccaatatttaattcagctaattataaatttaattcaatcttattccattcaatgagaacaattgattatacatcatatcataatcaatctattgaaggtttaacactgaaattttcaacaaataatttaccaatggagaataaattaaatcatgaaatatcaattgaaaacttattaagatctatcagtttgaaaagtccatcatcatctgttgcttcctctattagaaataattcattaatgacaaatttctttcttttcaatgcaggttataattataaatcttcgattacatattcaatttttaaagatacgagagacaaacaatatatttttgagaaaggttattatttaagattatcaaatgaattatcattattcactaaaaataaatttgtcaaaacatcatttgattattcgaagggttatagaatcaataaatcattaatacttaatctgaactttaaaactggtttaattcatccgttatataatgatttagttcatccgatggataaatttcaattgggtggtgcaaatgatatgaaagggtggttaatttcaggtatgggaccaaagcaaatgaatatgagtttaggtggtaattatttccatgcaattggacttaatttattctctaatataccatattatagtgattcaaattttaaatttcatttatttacaaatattggtaaattaacaaataatttttcaatattaaatgctaatgctgcatcaaatgttttcaaaaataattgtataagtacaggatttggtatttcatttgcacatccaatggcagcatttgaattgaattgggtcgttcctgtaactgctaatgctaatgattctatacatcgtggattacagtggggtataggaatttctttcttataaaagttaaaaatgtgaataaataagattagaaaaacagactattatagatatagatataatattatttaacaagatcatcacggctcttgatccattctttatgtaaagtaacaatttttggtataatcaaagattcaatttcaagttgattttcgatatctttttcagataatttaatccattcattatcatttggagtaacaaagacaacttctgttttccttgtttgtaataaattaccaataaccaattgatgattatatctctctaatgcagttgttgcctttttaattaaaattgaactatcagtttctaatttaaaactaacgatcattgcaattggtgcccatgaatcaaccaatcttctcaaaaatttcggtacaggttctaaatcaacaactaatttaccaccatgatcatgactttgaattttatgttctggtattcttgaactaggtaaaaagaaatcagagactgcagcagctaaatagaataaagcatctgatccaattactgataattcttgtgcaataagttttaaagtgaataaatattgatgaacggttgtgaaaggtactaataacaatctattttcatttttaacttgttgatatttcttcaatactgagactaaatctttttgtaaatcatcatcaacttcaacattattaccattattagaaaattttaaatgatctaataagcaattagttgtatgactgaaatgtcttgaatatggcagtaatgaaaattctctatgtaggaatattactgaataaccattttcaaggaaatattccgctgatgttgcacctcttgtacctgcactaaaattatcaataaatctaacagtattattttcaagtgggacagttgtaccacctgaagtaactaataccactttcctctgtttttgatgattataattgataaaactagcaacatcattacttatttgtgagagatatggaggtggtttatgaaatctgaaataattatcttcatcaattggggtagcaactgggaaatctgtgattgatctgtcaattgcagtggatgcatctggtgcagatgtagccacacggctcagaataggtctattttgatccattatagagtgttgtatattcaaacaagctattgtattccatttccaactccacttccaattccattaatcatatatatatatatatataatcattgaaattgtaatgataataatcatgctaatcattggaaaccaacctcggaaatttcggtgggaaaaaacgtctcggaaatttcaattgtttttttaaatttttttcagaggctgcatgttgataataaactcagagcatgaattgagaaaggtactgtttgatgacattgatagaactttagtttagatatggttgatccactgcgaagtgatatacctcatgtgatggtagatgacacagggttaaatgagtcatcaattaactcatcagatgctgcaaataatacaagaattagacatcctcaaaggatagttacccgaattgacaatgatagcagtgatgaatttttagatacttcacataattatttgcatttaccacctggaattaatcgtttcattcctcatataacacataatcaaaaggatcatgagaaaggttcagataacgaaagtgaaaaggaacatcatagtggttcaagttcaattgatggatcaactatggataggagtcatcacgtgggtgatgaatcagaatgcaaaagtaataataataataataataataataataataataatacagacaatacggataatcatagatatagcgatcacaggaaatacagtaatagatttgacagaagcaatataggtaaacgtttaaaacatagtgcaacagttgttgatgaaacttatgaaaattttaataaattcagatacagtacatttgcagctatacgtcaggttatttataagattgaagatttcttatctccaattgtgaaaagaattatacctaatttcattatagctcattatgtatatattattttcatgaccattttatgttcagttgtcatttatcctgagaaaaatatcgattatattgatgcattggttttcgcagctggtagttgtacacagggcggattggctacagaacaattaaataatttgaaattatatcaacagattgctgtgtatgttgtttgtatgttaactacacctattttcattcatagtttcctcacaattttaagattatattggtatgagaaaagatttgataatattaaaattagttcaattcaacaatataatatgaggagaagcaaaacaattgcaaatttaagatctgaaaccagtgcaagaacaatgactggtacttcatcgcaaaataataatagaaaaggtagaaattacgaaagtcataatgcttctgaaggtttgaatagtagaatggcaagatttgaaaatatgaaaaatcactcaaataataatagtatggaacgtcaaaatcaaaacttaaaacttgatttaaacacagattataattctaaagttcataatcaatctttaaatggatctactacttcaagcagccatgaaaagcaagaacaaagattaggatataatgatgaagttgatgatggtggtgcaataagtcatctaagtgaaccaactgaagatgaggatgaagatgattataatcataatgataattatgatagtgagattgatagtgaccatgaagatggaaataataacgaacataataatttacctgagtcccctaccagaacaaacattaaatttggtgagctacctaaacctcgtaaaaacaagaaaagagatttggatccaagagatttatatatgtctatttctgcccttcaaaaagaaccgaataattcaactaatgacattgagtttggtcctgcattacatattaaaagcccaagagaattaaggaaacatcgtaagggtaagtcaaatttaggaagaaagaaatttatcaaagaacataaactgaaaagacataagagaaaagcaagggaaattatggagaatgttgagaatgagaaaaactttctgaaaggtcaactggaaaatgttctgcatgatgattttaatatcaatggtgaatctaatttggatctgacaaatggtaaaaatcataatgaaattgatgaaacaggagaaaaaaataataatattgtaccacctagtagagaaaagcataaattacttgaacattcacatactatgcatgaattttcaaaaaaaatattttcaccatttgatattagtgcagcaaataataaagttgatgaaaggggtaattctaatttatttttaaataatgaatctgaatcagatgaaacaagcggggatgagtcatttaatcagcgtagacatccaaataatcatagaagagctagcttttttggaagaactttcagtttgaaatctaaaaatagaacaatgagtaatgtttctgaactaagtgatgatgaactgattgattattatggattgaaaaatgtaccaacaaattatctttcatgggatcctaaaattggacgtaattccaaattcattgcattatcagctgaagagaaagcagaattaggtggtgtagaataccaatcaatgaaattattaacaaaaattttaatttcatattatgttggatttcatattctgaatatcatattttttgttgcatacattaacaataagcaagaatatatcgatgttgtcagagcggatggtatttcgcctacttggtgggcatttttcactgcaatgagctcattcaatgatttaggatatacattaactgctacatcaatgatgccatttgcacaaaatgcatatactttaattatttcaggatttttcattttaattggtaatactgcattcccgatttttttaagactgattatttgggtaatgagattattttgcaagccattaaccatgacacataactcattaagttttttacttgatcatccaagaagatgttttacaatgttatttccatcaggccctacatggtggttaacagcagttttagttttcctgaatatgtttgattggattttatttataattttagattttggtacaagtgttttatcatatttaccaagaggttatcaagttctagctggtttgtatcaagcattttctacaagaactgcaggttttaatgttgttgatatagctacattacatccagctattcaattgagttatttggttatgatgtatatatctgttttaccattagcaatttctatcagaagaactaatgtttatgaggaacaatctttgggtatatatcatagtaatgatgataatgatgatgataaaaagggtaaattgaattatattggagcccatttaagaaaacaattatcatttgatttatggtttttatttttagcaattttcattatttgtattgtcgaaggtggaagaattaaatctggtgatttgagatttggaatttttcaaattatgtttgaagttacttcagcatatggtacagttggattatcattaggatatccaaatgttaatgtttcattttgtggtgaatttaaaaaattatccaaattagttattgttgcaacattaattagaggtagacatagaggtttacctaattcaattgatagagcaattatgctttctaaagagaaattgaacttaagagatgatattgaagcatactgtacaatgagaagaactagaacatttgattcagaggaagaaatggcaagtttgtttccaagtatttcacgtgcagtaactgaatcatcaagaccaatcaatcatgaaccaacaattagtgagaatatttcaaatggtgttatgccatggaatcaaattgctcaaaaaggtttaaaattattgggaaagggattatccaatgttttgacagtttctggaacatcagctgaacaatataccaaaggtattaaaagatttaatacatttgaaggtaatccaactagaactagatctcgtagttatgcaagttcaagtaatagatatactgatttaaattcacgttttaataatgaaagaaatagatttgatgataatgaagaagacgatgaagaggatggttatgaaccatggaataatcaaagaaatgcacagtatgttgattataattatcacacaaataataatgatgataataatgataatattcaaactaacgaggaaggaagttcaagagataattcaggtaattattcagactctccattacatgatattccattacaaaatatgggagtttaggttgtatataaatagtactcaaaaaatttctattctggcattatagtcatgtaccgttgtatgttatgtatgatattgatgatacaatattttaggtattgaaaaaaaatagtggtagtaatagtggacgttgtacatgcgtattagtcgtataccaattgtttctaaatgaagttgtaggtgataaaacagggttaacaacttaagtaaaaaaaccattcaaacttttatagtagtaaaaaggatatataaattaaataatatatgtaaaagttgcatacatacataattatgtaaatacattagcaaagtgtcatttcttaataattaataataaattaataataagcaattattcattatcactttcaaacatatcaagatcaaaatcatcttcatcaatttcttctttaatttcttcggatttattttcattttttattaatggtacagaatcgatattttgaatttcaacatctttttcattgatttcattatcattatcattatcattaaaatcgtctaagttatcatcatcgtcatcataatcaatatcgtcttgttcaatttcatcctcttcttcctcttcctgttcttcaacagcttgacgttgacgcagttgtgaataataagcagataatgcatcgaattcctctgatgttgtattttcattatttgtaataaaattatgtgattgtgattgtagttgtgaattgccacttaatgaaataggtatagaatttgtaattgctgatgaatttgtaattgaattagataatgataatgtatcagatgtaagtgaaggtaatgaaggtggtatattatcacctgcaaatgatgattttgcatcatcgttgatattatctgttgttgtagtactaccatttagtaaagttgaagcatcaggatcagttttaactaaatcatttatatcactcatttcatttatattatttgaagagttaatagtttctgaatcattaaattgagattcagtttcaaaatctaaacgacctaatgcagctttaccaacagttgattcttgatgccaagaaggtaaagcattctgtctaagttttttatttctatcttctctcttttgtctttcacgtttaagatcttcatcatcggcagtaattgagacattaattgttgcttgagctttctttgttggatcattattgttattattattattattatcatcatttttattattattatttttacgtctatttggaactttattagcaatagaataaagtgctaaagaatctgagaatgcaggtacgtatttcattaaagttgattcaaaattattatcatcaatatttaaatcatcaacaattttcaaatattgaataattggttcaactaatgacataattttctctaatttttcttgaccttttttctgttcttgagatatatcatcatcaattaaataatcattacaaattgaacattcaaaatttaatttatcatcagttaaaagagaagcagcatctaaaagtgaatatttatgatgacaagttggacaaatataaccttgaggttcactaaaattaccaatttcttgtttgacttttttaacaattgtatgaactttccatttaattgcatcaattgcttcaatattatgaatataataataagttcttgaatataatttatattgttgagcttcttccttttgaatatgagttgaaattaatttatcttcaactaatatattacaaaaagaacggaaaactttcctatgcatacaacaaagttttgtaatatcatcttcgaaaagtacatgatgaaataatagagcttccattataacaatacattgatgaggatagaaaagataaactacttgtcttagaagatgagcaattgcattgtcattctctgtaaaggcttctgagagtcctgacattgtgcttttgataaaagaatatgtattattaatctttaaccttaaagtcttttcttttcgtgatcaatttataattaatatattcatgtaaatactgaaagaatccaaaaaaaaataataaaaaaataaataaaaaaccaccgacgcatcgaccctccggtccttaaaaagacgcaaagactcaccgccgcaccggcgcacattctcgggaaatacgcctttcctctcctgtctcccttcacattctttttctgaaacttatactgaatgagaccacttttgctatgatgtgtaactgagaatttattcaatgcatcttttctaatttgtcttggggaatattggattggtatatttatattcttctttacttttcaagtacaatcatcttaatcttaaaattgacaagtgaattatatttggaaaattataactgtcatacatacataatacattcatacaagaggcgattaattaaaccatcaaataattaaattaaattaaattaaatgacatcatcaaagacaactgcaaatattcctgacgaagaaccagaatttattacatattcaacttcaccatctggtaagcataagggtaaaacacattatattattgttggagctggtataattggtgtttgtattgcattttatattacgagacatccaaaatttgatccaaaaaaacattatattacaattttagaaagtaaaagagttgcaggtggtgcaagtggtaaagcaggtggtctattagctttatgggcatttcctcaacaaattgtacctttaagtttccaattacatcaagatttatcaaatgaatttaatggtgaatctgaatgggggtatagaagattaacaactattagtgttgaaggtgatatatctgattcaagattaaattcaattaaaaataaaaataataataataatataaaagacaaagataatcataatcatagtaataatagtatacgaactaattcaagattaaataatattcaagaagatgaaattgataatggaataactgaaatgaaaagagatagcaataataatagtaataataataatagccataatagccctaataactctaataatccacatttagatcttggtagtaaaccaatgagtagagcaacaacaattaagaaaaattcaattgaaattgaatcaaataattctaattctgctgataaattatcatatcatttaccaaaaaatttaagttggattaatgatcaagttattaatgattggaatcaattaggtaatgaatcaacaactgcacaagttcatccatatcaatttacaacttttatacttaatcaatgtatttcaactggttgtgttgaattagttattggtaaaattgatgatattataattgatgaagaaacaggtatttgtaatggtataatttatcatccatcaagtgctaaagctgaaaatgaaggtataacagataaaagttttgaattatttggtgataaagttattttatcaattggaccatggacatcaaaaattttaccagattgtccaattagtggattaagagctcattcaattataattcaacctgaaaatgttgaagaaattagtccatatgcagttttcactgaattaaaattaaataaaaataaatttgttagtcctgaaatttatgctagaaaggatgaagtttatgtttgtggtgaaggtgattcatcagttttaattcctgaaacaacggatgatgttgaagttgtaactgaaaaatgtgaagaattatttaaatatgtttccaaattaagtaataatttgaaaaatggtaaagttttgaaaagacaagcatgttatttaccagttttagatataccatcatcatcaggtccattaattggtgaaacaaatgttgataatttatatttagcaagtggacattcatgttggggtataaataatgcacctgcaacaggtttattaatgagtgaattaattttagatggtgaagcaacatcatgtgatataagtgcattaaatccatcattattctttgatgcatcattaatttatgatgaagatgaagaagaagatgatgatgaggaaggtgatgaagaggatgaatatgaagatgatattggacgacctttaagtgatgatgaagattgatttaattaaatgtgtaataattataattataatatttaatacttaatctaataataataataataataataactggaatagattggtgatatgaaatattacgtaatactctacagtacaccttataaaacttgaagggtaaaaaataaaatttttcctactagcatatagtctcctaacatgtcattttactaaataataatatattaacgggcttgatctgtttctgatttaatgatcctggttttaagtttggattttggattttaaattttgactttaagtttcattttattataagacattagttattttactattaacattatataatgtggaaattagtacaaagtggattatctgtagttgcaggaactgcagaacctgaatatggacctgattcaattcatccagttaattatgatagaaaagctgatgatccattatatttacctttaactttagatgatttaaaatttgttaatccaaatcatacaaatgttgaaacaatggttttctattttgaagattcaattaatgcaggttttgttcaattaattcattcaaatataattggtttacatacaactgctcaatttacttttaaaattttcccaaaaagtaatccaacagattttatttggacttcaacaaaacttgaaaattttaaaattgaaaatgaaactgattttatagctgatgatttttcaattgttcttaataaagaaaatggaattgaaaatattaatgaatataaaattgattcaagtgttaataaattaactgaagttcatttaattgttaaaaaaattggtgaaagtattaaatttggtaaaaatggtacaacttattatggtactgatattgaaaatccttggggttcaatgagacacgctttttggccaagatgttattcaaatggtgaaattattttacgtgatttaaaggaaggtcaaaatttagatgaattagaaaatgatcaaattcaatatattgaaagggaaaaaattaatttaaataattctttaacaatgtttgttatggcattacaaggtatgaaacctcatcatgcagctgcaacttgggatttcttaaattatcaatctgataattattctgttgttataatggaatttacaactcctcaatcatataataaaacaaaagttagtgctgcaattgtaacaaataaagatggtaaaattatattagcaacaatgaataatgatacaaaacatttaaattgtaaaattgatgaaacttcaggttggaatgtaccaactaaaatttcttataatatgcataatgaggataattcaattaaagttgaaattaatggtaatttagataatttatgtgaaagagttgatgttatggcagaaattcctcaatttgttaaaaatattgttagtggtgtagctggtacaaaaccttacgtttatcaatttagtaataatatgaatttaaaaattattaaaaatgataaaattgatgttgatgaaactggttatggttataatgaaacaacttttattactgcaatataaatttaataataataataataaataataataataattattatcatcttaaagtctttccttatactatcaaaacataaaaaaaatatctaaaccttttctgtttaaaactttttcattaaaaaatagcaaaactgcatttaattttaattttagtttcaattttaatttaatttaattttaatttattttcatatcttttatatcttttatatctatcttttatatctatatatctgcagtttacatgatataataacatagttcttcttaatagtaaatagctcatatagacttaatgacatcatcgaaaaaccgtgaaaaaagaaattttaatcttatcgctcttagaaaggtcccgttcttatcccccagaaatccgttttatacttaattaactcactgtttaaacttgttatattacttgttcacttgttatcactggatagtttgataaataaacaaggtataagtaatgcaacagattcaaccattaacacagacattatttaccgatgaaatcattcaaagcggtgttaaatctaaaaatattaaatccttatcaaaagacactaaaaaggaaaataaccacattaacacctcccctccaacactgatttcatctgggtttttaacaggtgaaacttcagaatgggtcttatttgataatataccatcagttaatgggaaatgtgaaacaattcatggtgatagtgataatttaactgatgatttagaagttgaaaaagatagcattttaagtacaatttcaaatagggaaagttatgtcattaatgattttgatattatatctgatgatgatgttgatggtgatgttgatggttattatgatgatgaaggtgatgatgattcattgataaatgttgtacgtgatgaaatgaataatttaattggattaaaattaaatgatacaaaggaaaagcaaagaaatgaattagttgataaaataaataattggattaaaggtttaagtggtatagagaataaaactcataatcataataaaattaatagcacatatgaaattaagaaaaagaagaaattttttaatgataaaactaaaatggctaaaacaattatagaaatttatcatttaaagaaagcaaatggtattcaagagataaataattctcaattaaaggaatttaaaagaattttaaataaattaaatactgcattgattaaaactgatgattttcaacatgaaggtatctttatgaataatccagatttagaatcttgtatacccggtaattggaaaaatatgatgttagataatttaattaatacaaattatgataaaaataatattatctataatatgggtaatgttgtaattgatgatataaagaataaaaataatgaaactaatgatattaaagatagaaatttttggcaaagagatgaaagtctatcaactcaaagtatcagtactggctgggatggtattggtaatttataaaaaagaatttgtactctgacttaatctatataatcctataactaaataaataaataaatataaataccctaaaacatctcatattttgatttttctcattccaccaactctatatctactaaaaatgaagaaacatgtagccaaagtacatgttgcaccagcaaactctaccattgaattataaccaccttttgtctttgttaatgccataccaacaggtaaactaatcaaattacaaaatgaaacaacaaaatatgcagttccataccttttaccaaaatcttttggttttgaaattgctgatgtacataatggtgttaatgcaagtgtacctgcaactgcaaatccaaaaataattgtaaatgccataaatgcacctaaatgtttaccaaatggtaaccataaaatccaaactgataatgacattatagctgacattaaaattatcagattaaaattaccatatttatctgataggaaagctggtataattctacctaaaacacctgctgcattaaaaactgttaatgcaattaatgatgtactctctgagaatcctttacttaatgcatatgatggaatatatgtactaaccattaaaagtgaaaattcatttaaaaataatgcacatgtaagaatcataaatgttaaatctttgaatgatttgaaatcaagtaaatcattaactttttctgtaaatgacattccactaccatcaccttcatttaatctttttattctattaatctctttatgtctatcatgagtcaaaattgatccaattaataaaattgtaccaatacaaaatcctaaagttctcattgtccattcaaatccaacttgtgtatataatgatctacaaactaatggccagataacaccaccaagtgatgcacctggcattgcaattgataatgctctacctctctttttattaaaaaaatgaccaatacttgtaacaaatggtgcagttaataatgaacaaccaaatccacaaacaattccaaatgataaaataaattgataaatttttgttgaatttgcagttgccattaatccacatgttgttaaaaatgtacctgttaaacataattgtttaccgccatatttatcaaagataacacctgaaatcattgtaccaaacataacaaagaatgaaaatattgcaaaaatcattgaaattgcaatttcattatcattttttagcatatgagttgaaatgtatgattcaattgcacctgttgaattccaaagaccaaattctccaactaatccaaggaaacatccagataatgttaaatatgcaattttaccaccttctggatattcaacaacatgttcagttattatattaacttctgtgccttctttggattttaaatcatcattaatatcctcaatatttgataaatattcaatttctgaatccgattcggaatctgagtcatctaaatttggatcaataccgctcatagcaatagatggacgtctttcataatgtgtacttggcagagaatgtggtctgaatgagacaacatccgcagatacttcgtattcagcactattacgcattatagtgtagatatagtcaacatcaaagaaatcagtcgatgatcattaacggcttcagacctgttcttttaagttgataatttatctggaaatttcatttttttttttttcttatcagttcattctgaatgcggtattaattccgagagggtggacttaagcgattaggaccgttagtaacagtgtattatgttctatggtatataatgtgcacattattggatattttatgttcacatttagtatgataaaagatggggagtacggaggcactcttgggtggctgaaagtggtaaattttggtaaaaaaaattttttttgaaataatcaaatttgaacaactaaattgttttgaatgtttgatcaaagttctatttttgaaaatttacaaaattaactaattttgttttaaataccattaaaataacattgcgccagccagtgtactagtagcagtgcttataaagtttaatacagtcataagatcttgaaaaactatgctaaaacttaaacatttttaaaaacacaacaaaatacgtgtcgtggggtttcttatctgtatcactcaaatttacctgtgtttataacaatatagtacaattatcgtcttatcttctaataataaaactatataaactataatacaaaataatatataaactctaatcaattaacttcataattactgcatgattacatcttcagtatcatttgtaccatctaattcatcatcagagccttcaatataagccatagtttcacttttctcatattcatgaattaaactttcaacaacatctttactatcttgaagttcttgaataatatcaccacattcttgatcataatcacttttaaggaaattattagtaaatgcatttttcttcattaatttttcataatttctaatctcctttttgagtagattaactatagatgtagtatttgataacattaatccactaactatatcatcattcttatcagacttattgaatattgatttttcactcattgctaaatgaactgatgatgtagtccatggtgcaaaatttagtctcgatttagccttgattaatgttttctgtatattgatactttgctttgaatcagttaatttattctctcttataattatatccatcattgctaaaactgtttcctctttctctcccttacaacacattttcaaatttttatctaaaagatccaaaataacatccgatgatgtacttcttcgaatttcctttgctgcatttctaacataatctgatgtaaacggtgtataacttggtgtaagaaaatgtaaatccggtgtcggtattaaagtagagactatacttgtaagtgaattatatgaatatgagggaattcttaatgtatttgttgaagctgacattactgttgatatcaatttgttaggtatatcatgttcaaaagtatcaatccttaatttttctgtcacaatttgtgttaaagatgcattatcaaatactatatttgcatcagaattttgaattaatcttttcaatgttaaaattgtattatatggttgaacgacaacttctgaagctccgaatactgaatctgtttgaattagtttcttactatatcgatcacttaaactttcaagtaaatatgaaccaaaacctgaacctgtacctccagaaaccgaatgaactaattgaaaaccttctagattatcacatgaatctaattctctatcaatcatttctaaaactttttctatattttttttaccattaacataaccttcaacccatttattagcagctcctccaccatcagatgaaataaaaatattttttggatcaaataacccttggtttcgtgaaactactgaatttataactcttggttccatatcaattaaaatagctcttggtgtatatttttcatttatacttctcttaaagaaaacatctggatgatcattcctttcaatagtagagtagttttccacagttgatccatcgttcaatataccatgttctgaacaaatttgtgaccagaattgtgaaccgacttggttaccacattgacctgaacaaaaaaataaaaaatatttgaaaatagttatgttagtattcaaaattaaaatttttcaataatagtgtaatttacatacctgcctgtaatgtcaatatctctcctgtcatcaatttgtcttcgttatatgaggatatatacccttgaaatagttgaagatgaagagtaaacaaacggaaacacgttaaaaatttgaaaacccagcgctacatgaaaatgtgaagaagacccaggtgatgctgaaagaatggttttattgtctgattactacaattgtgaagtacaataatgataattcaatggctttactgtgttacatggctttttttatttgcaccatcaaatgcagtaaaggaatatttattcaagaaatgtgaacaaaatggattttgtcatagaaatcgacactttgcttccgaaatatccaaatcatttgagaattacgaacctaaatatcaactagatagatcaacttttgttattgacgagcaaaatggcttatttaacggtatgatgcaaaaagagctcaatgatggttcatttaaggatcttgtttttgagatatctattgttgaagactataatttgagattcaaacttgatgaaagggataggaaatcagaaataacaaaagatattaaagtaaatcctgagaggtataatgaagctagtatatgggcatttaattcagaactgactcaaaaatcatttaattatcaaattttagatgatgaaattacaatgatttatggtgaaaataatgaatataaaagtattattatgatgcacccatttagaatcactgttttttacaataatgtcaaacaaatcattttaaatgatcgagattttttaaatttagaacattatagagaaaatgatgaatttgatcaaattaatgtttcattagaagaatctaaatttaatagttttgtagatacttttaaagattctaaaagtgatacattaccattaggtcctgaatcagttggtttggattttacttttgtaaattatactcatgtttatggtatcccagaacactctgactcattctctttaaaagatactactaattcagatccttacaggttatttaatgtcgatatttttgaatatgaagttcagagcaaactgtcaatgtatggttcaatcccattaatgatcgcagttaaggaagatgttgctgcttccatcttctggattaattctgcagatacatacattgatattaagaaaaatcttgtggcgaatgattttaaagatacccaatttatctggaaagatgattcaactacttcagttaaaacacattggatgtcggagaatggtataatagatgtcattttatcagttaaatcaactcctatggagatttcaaaagcatatagtgatatcaccggatcaacaacattacctaacttattttcgattggatatcaccaatgtagatggaattataataatcaagaggatctgcttgaagttcattctaattttgataaacatgaaattccttatgacaccatatggttagatattgaatacacagatgaaaagaaattttttacatgggataaatcattattccctaatcctgataaaatgatgtctattttggatgaaactagacgtcaattagttgttatagttgatccacatattaaaagtgattatcatatttccagcttaataattgataaacaattaggtatacaaaatatcaatagtaaaagtattgaaaagacatatcatggacattgttggccgggagattcaatttggattgattcattaaatcctaaatcacaggcattttggaataaacaatttatcaatggtagtgatctgcttggatattccactaatgggcatctgtggaatgatatgaacgaaccatctatttttaatggacctgaaacatcggctccaaaagatctggttcattacaatgattgggaacacagatcaattcataatttatatggattatcatttcatgaacttacatataactcattattaaatagaaatccaagtaaaagaccatttattttaactagatcattttttgcagggtctcaaagaaccgcagcaatgtggactggtgataatatgtcaacatgggagcatttaaaacaaacagttccaatgattttaacaatgaatgctgttggattcccatttgcaggtgcagatgttggaggattttttggtaatccaacaagtgatttattagttagatggtatcaaacaggtatttggtatccattttttagagcccatgcccatatagattcaagaagacgtgaaccttggattgcaggaggtgagtatacagattatatgagagatgcaattaagctaagatataaattactgccattgttttatactcaattttggaagagtagtattactggagaaccggttatgaaatcattaatatgggagaatccaagcgatttaaatggatatgacattgataatgaattctttatgaatggtctatttatacgtccagttgttgaagaaaatgctgaatctgttgatatttatttcccatgtgatgaagaaacttactataatttcttcaacttgaatgaaaagattgaatgttgtcaaactgtcaatgcaaaagtgacactaaatacaatacccgtttatatcaagagtggaaatattattacaactaaagatagatacagaagatcagctcaattaatgaggtatgatccatatacattatatgtagttattggatcaaatggattagcaacaggaaaattatatgttgatgatggtgaaacgttcggttataaagatgatgattatcttgaagttgatttcattgcagataattcaaagagagttattgaaggagttgtaaatcataataattcatcaggatttgtaaaatcattgaaagataataatgttactatcaataagattattgttgttggtagtggtgaaaatataccccaaaaggcagatatcaaacaagggaatgaagaatgggaatctgaaattatttatactccagaggacgattattttgttattagaaatcctaaagttcttataacatcaaattgggggattatgtattagaaacgtaaaatttgatttatttatttatgtagttagaaatttaataaactttaaaaatagttattcgaacttatgcaataagaaagaagtaaaaaggaccaaaacaagcaaaaagagataaagaaaatatggacacatattcaatgacaagaaacagaaacatttggtgaatcaaaaatgtaatgacctaaacctgcaccaatagaaacagataacattatccaagtattaaaagtcatgaataataacataataatcattgaataaccaacacttaaagcataagtaatcgaaatctttgtcttaaatttcttacattcacttgcagttgcaaaattaccatttttaagctgaatatatctattttgcatttgatcaagaaataatttaaaatattcataacccatacaaaataaaacaatagcaatcattgcaaatactaattgagtctttgttgtaaccattaatttatcagtcaaaatacaaagattttcataatcactattaaatgtcattgacattttacacattttcatatttggcatatcatgatccatacttttactactcataccgtgattcataccgtggtgcatatcatgattcatcttcacgttgttagcattgaaatgatgattattatcacccattggatgatgttttctcattttgtgcattgaatgacatggtttttcttcacctgttgcgatttgagtggttgttgatacaacttctttaacaaaatcttttaatgcctccattgtgttaataagagtctatttaactaagagtgaagagcaggaagaagatatacacagtaaattatatagaaagaaattaaccttatacaaatacttatattacccaagcccgtgtatttatctccgaatgaacatgatccaatgtgagcaatttatcttattgagaacgacgggatttgcatagatagcaccacgtctatcgatctctatcgattaatagacgcaatatgcatgtggatcggtgttaattctgtttattatttaccatatacaatccctatacaatatctgcatcaaatggtctcctctctagaatcaagtcaaagggctccggttcaattgcaagagattccgggtattgattcaattttaatgaattatcagacggaattgtttgatacttcctctctgtaacaggtgtaggtttgaatcttaaaatcatcttactgaataaaatgtaaagttctctaaatgcaaagttattaccaagacatttcctacatccaataccaaaagcaaaatgtttcatagttggatcaataaccatcttttcagtaaaatcattatcaactatacttattaaccatctatcaggaacaaattccattggatctggaaatttctttggatcatgattagctgcccaacaattcataaataaggttgtaccctttggaataattgcatccttataggcaattgtatcagtactttctctcggtaatgacattggtaaaactgtaaataatctcaaagtttcattaacaattgctttaacatattcacttttcatttcattagcacattccttatatgcaagttgataatcattcttatagtattgaattaaatcattgaaagctttatcccaaatttccggatgataattaaccatttgatgtaatccatacttgaaatttaatggtgtattatcaagacctgcgctaaccattgtaagacactctgaagtgatttcaccaattgcaagtttagattttgcatcatcaaaataattatacattaaagtgttttttaaatcttcaattttattgattgcatttgtagaattattttggctttgtaatttatgcaacattttaccactattaatatcatcataaagatttagagcatattgataaaacattttcaaatatctatctctcttattatagagctcaccaaactcataattttttgttgaacaaagattaaaacctaatcttaagatgtatggtaaataatcttgtggattttgaacatgagatctaactttagtaatcctattttccacatcaataatctcatcacctaaatgttgatgaatcaaatcattaatattaaattcaaacccataggttaaccataatgcaacttttaaatggaaatattgtgcttccttaaccatatcatttgaaactaaatttggtttaatgtcaatgtcaatatcaatatcatttttattattattattgattgattgatttatgattttatcaatcatttcatcacaagcattattcattataacataattaaaatcattattacgtttaacactcaaaactctttcactaatatgttttcttgatttcctataagtttcaccaatgggagttgtaccaattgtatagattccctttgataaaactttatgaaagctataattgataggtcttgagttattagccttaatatttttactgcaccaaagttgtttaatagattcataactattagcaacaattataagtttggtaccaaattttatttgataaacatcatcataagttttagctaaattttgaaattgaatacaaggtgaatcttcccatcttttagcttttggaagtataatttcaagaccattaagaattggaaatggagtataaaccatatttaaatttttaattgatcttggggttataaagaaatcaatgattgttgcagagatgaaaccaacggagaaatatacaagaaatctccatatcatataacctatttgaaacttaagttgatgtatggaatacaagaaattaattacagcatccgacatgattgggaagcaacgcaaagcaaagcaaagccaagaaaagaatactacgagaaagtattaataaaagtacagaataaaagtgtttctttaagtaagtggaaggtttaagtgtagttgtatttgttgttgttgttaaagtgtagctagatgccaaaggaaagaaagaaaggaggaaagaaggtaaaacagtcataaacaaaaggaaatacaagttgctaccactttataagagaaggcaattctttttttggtgcctcacagtaattcagatggtacctcgcattgcctctcttcttctataattctttgttctctttgttctttttctttaaaaagtatatatcctataataagatgatcctcttataataagtatgactgtaaataagtaaataagtaattaaacagaagagtgatattctaataataatgctttagagtgtaaaagataataattaggaatgctcagctgcattgtgttttatcgaaatttgcttatcaatttttaaattcgagaatttttgctgctataaattttattactataggcagttctaagcaattggttactataattataactatccaaattatagctgtttttttctcaactataagctgcaacgttaaacggttcttaaatatttcaagcctaccaattcaattacaatagtattgtattaattcacataatatattatatcaatgcctgaatatacttctatgttgcgaaatcaaaatatatcgccaattcctactcataattcatctaacgccatttctacttcaatttcaatttcaaattctaattcgaaagttagcttaaattcaaatacagataatgataatggtagtattagtgacactctttcaaatttgaaagaattggcttatcaatatgatatcactaaaaatggtagagttactatacccaatgttcaatgggcttatgcaaaccagcaatattctcattcatatagcaaattcgattttcagtcttggaaatttgttgatttatccttattaaataatggtaaattggtatctggattatccctgattataataaatgatattcacgaatgcaacattaaaacatttcaagattattatgttttacaaataacggttcctacaaattcaacatcattgtcatcatcttcattaccatcatcatttttattcaaatttaagaacttcaaagattatacaacttttttaagtacaacaatcgtatggaaaaatttacgtcaaagtggtaagttaaataaatggttatacaataatccaaaggtagacttaaataaacctgaagaggatatattagtaagtaaattgaatgtttatgctccaataccgaatgaaattgatgatatagaaataaatacgactccaattaatccattatatacaagagaagattatggatggttcaaagtggattgtcatataacttctcatggtatattgaaattttcctataaaaatgacatactattgaatcaaattgatataaaacaattgtttgaatcagagatacgtattttacatcattcaatactgggaaattcaaatgttttatacattggtgtcattgatgaattacgaaagagtcataatctaatatctaaaacatctaatttggaacaattagataaattattgattgattttgatttaagagttgatttagagaattggtttataatcttgaaatcttttacaagattagaatatttgggaaataaattcattaaagatatttatttaagaaatgaacggaaactatcattggaaataatggaatcacaatttaatgataagtataaatccaattctaatgatgaatcatggttttattgtgaattaattatgtggaatattccatggttccgaagtgatattgttaaaattgatgattcattatcaactttctggaaagaattaattgaaattgaattaccaatgtcaaataataatgagattaaattattaattaaaaaatcaaataatagagatacttatgaaattgaaggtgataattcagatgagataataggttcatgttttatcaccttggatgatttagctggtgaaatcaattatttaaggaaaataccaatttataatttaagaaatcaagttattggagatttaatagtcaatttggataagtttgaaaataatatactatcaactaataaatataaaagttttgaaaatattctaaaaaattttaaaatagagatgcttatctcatatatagaacctaaatgtacaaccaaaaatttagaatcttggtcaacagtattacttgatatttatcaaagtttacaaaaggaagatgaatatttagaaactttaattaagtatgaactctcagattctaatatattactcaaaaatcaagaacaacaacaaatcttattcaaatacaatacaattttccgtggtaattcaattttatcaaaatcattagaaaagttcacattaagagtcggacatgaatatttggaaaaattattaggtgaatttattgctaaaattcaacaagaagacttgaattgtgaatgcgatccaaaaatagaacctgaatcatatgaggaaaattatcaaaatttattaacatatcttgaaaatttatggaatagaatttataattcaactaatgatataccatcaaatataaagaaacaatggaaaatcttaagaatgaatgttgaattatcagttgagacagagatgaaaaataacgcaccagatgatgcaaaattcaaagatgttgcattaaatgcattgagttcatttatttttttaagatttatatgccctgcaatactgaatccaaaattatataatttatcaagaagtcattattctggtaaaatatcacgtacattaatattaattgcaaaagtattgatgatgttatcaaatagaagtgaatttcaacaacataaagagagttatttaatgaaattaaatgaagattttataaagaagcatggaaatgaagtattaaattattttgataaagttacattgaagaaaatggatttcagtgaaaaattattcaatatgagtaacaacaatagtaatattaataatgaagaacagaatacttcatatttaattgataaatatttgagtatggacaaattaattagaatattaacaagtgatgaacaagaaggggaaatgagagaagaatgtaacaataatatgaaagaggatgaattagttaaagattatcaaattgagggatttgatgatattgaagacgatttccttacatcaatgattaaggaagaggatgaaacatttggtaatttattatctaaacatgaatttaagatgaatgatatcaaaaaggctgcagaaaaagtagtaagagaatgtaaaagtattgaaagtattttagaaaaaaatgaagatcctgaaatatatgatgataaaagttggaaagagttcattgattatatttatgagaatatatcaataattaatggtgaagttgttcaaacaaatgtcgatgatgattatggtagtgataagaaatcacctgataaattgaatgaaataatgaaagtaattgaacaacgtggtgctattgttaaatcacaaccaaaagttatcaagtgtgctgaagtaccgattgttgaacttaagaaggagaagtcaccaccaattactgaagataaaaagaaatggtttaaattgttcaaacgtaaaagtactgtatttaataaataatatagataaaattcatataaataaaataaaatggtttcatttagtagaggcttatgtatgatatatttgtgtatttataactaattagttttaagatatgattagaaattagaattgatatattaaactatacttaaatatgagcagctcttggtgcttcaccttcaggaccaatatattgaggatctctccaaggaccgatatcacttaaatagagaccaccatcttcttcagaaacttcagaagtaccaccaaatttagttggtaaattttcagcagggatttgctttaataaatcttttttataacttgaaccaagaatgaaaattttagaaactgtaacaggatctaagaaaggtttaaataaacggaaagcagttgagaaaccgaaaggagcattaataaggtaaaatttacccattctttcagggtaataattttgtccaatataagaagcttcacgaacatatgataaaacttgagaagcagcagtaattgagataccctttaaatcaagaattgtacaagaagtttcaattaatacaccagcttttcttgaacaagcaggtaatctatatttagcaaatgattcatattcccaaactaaatttttaagcattctttcttgagttgtaattttatacatttgagttatattaacagcacctaattcttcaatataaattggtctaccatcaatatcagttttatgataatattgaggataaaatttagcaactattggtttttcttcataattaaaatctgttaaaattgtattagttccaaattcttttctccatttttcacaatcttcatacattttctttgcaagcataatatcgaattttctagctctaaggaaacgtaaaagtgttgaatcatcagttctttcaacataaccttcagcttctaacattaattttaattgttcaagggctgatttctctgaatctgtcaaataaccagggaacccagtttgaccagatggaggtggagcaacatgtgatggtatagagttaaggatttcttgttcagacatgctcaattgggtaaagaataaaggaatataaaggaatataaaggatatttattaatataaaaaggagtatttatttatttatttacagtctaacaataatcagaagagcattgacagtataaaagcttaggaaatgacaagtttctcttcaatttctttaaaatttggcacttccagcgtcgatgggccgagcgacgcaacaccgacgcgaccgctcttttgttgtagccatttcattacgtcatctctccccactgcattaaccttttccactatttcatctggtgatagacgtacacccgttgtgaccatttgtctacctaagtcctctgcaactgcagtagtaccatctaatgaaaggagaagggatccacgtaattgtgcctttgatgcctctaattcatcatcactaaatttacctctttgaatacgtttccattctttggtaagtgcatttataaaatctgaacatcttgtagttgcacctgcatcatctctatcaataactgcatacatcccccataatcctgtatctgtataactagttgaaaatgacatatatgaattacataatggtgcattaccattagatggattaccaacttctttcgctaatggtgtatgaccaacagatgctgaacgttcccaattaccaacaattgcttgtgcaactaatcctgtaaaataatctggtgatgaccatgaacatccctctaatgtaattgcaatatataaatttggtaatgattcatcaattacattaacttcaccattacagaaaactggtaatccacttcttggtgtacctaaaggtttcggacgatcactaattggaacatgtccaaaactttcaattgctgctctaaccatttcttcatgatcaacacatcctgtaccaactaaaaccattctatcacctttataattagtttcaatatatttctttaaatctttttgttgaattgatttaatacattcaataggtccaagaattgtacgtcctaatggttgatccttataaacaacttcatgtaatctatcgaaaacaacttcatcatacattttatcaacttcttcactctctctaataataacaggtctttccttttcaatagcggttttctctaatttagattttgttaaaatatcacttaaaatatcaacactacgtggtatatcatcacgtaatgtttttgcataataaacagtattttcacgacttgtatatgcatttaaatgtgatccacaattttcaacttctaattctaaatcaatttgactacgctttttggtacctttaaatgctaaatgttcaagaaaatgtgcagtacctgaagtttcatcactaacatccgctcttgaacctgcatcaatccaaactccaactgttgctgtcaatgtatgtggtatagtttcagttgcaactgtcataccatttggtaaaacagtcattcttgtattactaactgcactagcagttgctaacttacgtacctgcatagcagaacgtcttaacgcattaaacttaagcatattctctatagtataagaagaaatagtagagtgtaatgattaataataaaattattaaggataaaactcttagtaagtaaaaatcttgacatcgctctcacagtctcaactctttttaatccaggccttttttcgccacctggaccttttactaagacttcagtggtgcattattaatagaattattaataaacatctttcttttatcaattgacaaatgcaagtagacacaccaacccctacagattcccctactccatccggtgctattgatgaatctctttattcaagacaactttacgttttaggtaaagatgcaatgctgaaaatggcttcatcaaatgtacttataattggtcttggtggtttaggtttagaaattgctaaaaatgttgcccttgcaggtgttaaatcattaactatttatgatccagtttctgttacaattcaagatttatcatcacaattctttttaactgttcaggatattggtcaatctcgtgcttcagcaactttaccaaaacttgcagaattaaatcaatatgtcccaattaaggcaattgatgaattatcacctgaaattattaaatctttctctgttgttgttgcaactaatttatcattagataaacaattggaattaaatgaaattactcatcaaaataatattaaatttatctcagctgatattaatggtttatttgcaaaagctttcgttgattttggtgaaaatttcactatttatgatcaaaatggtgaagaaccaaaaactggtattgtctcagatattgaaaaagatggtactgttacaatgcttgatgataatagacacggtctggaagataatgattatgttaaatttactgaagttaaaggtataccaaaattaaatgaagaaggttcaatttataaaatcaaagttttaggtccattcgcatttcaattagttgattttaatgctaattggggtacatatgaaaaaggtggtatttatactcaagttaaaactccaattaatgttaattatgaacctttagcaaaacaattattagagcctgaattcttaatctctgattacgccaaatttgatagaccaatggaattacatttagctttccaagctttagatgaattccgtaaagttcataataatgaactaccaagacctcacaatgaaactgatgcaatagaaatcttaaaattcactaacaatcttaaatccaaatattccgttgattcaattgatgatgatttaatcaaagaatttgcatatggtgcaagaggtgatttacctgcaatggtcgcattctttggtggtcttttggcacaagaagttttaaaggcatgttcagggaaattcgttccaattaaacaatggttatatttcgattcattagaatcattgccagaatcagaggaatatgaaagatcagaagaaacttgtaaaccaattaattctagatatgataatcaaattgctgtttttggtttgaaattccaacaaaaattggcaaatttaaaaatattccttgttggttcaggtgcaattggttgtgaaatgttaaagaattgggcaatgatgggtattgcaactggtccagatggtaaaatttttataactgataatgattcaattgaaaaatcaaatttaaatagacaattcttatttagatcaaaggatgtcggattaaataaatcagatgtttcatcaagagttatttgtgaaatgaatcctgatttaatcggtaaaattgaatcaagaattgataaggttggtgaagaaactgaacatatctttaataatgaattttgggaaaacttagattttgtcacaaatgcattagataatgttgaagctagaacttatgttgatagaagatgtgttttctttaagaaaccattattagaatcaggtactttaggtactaaaggtaatacacaagttgttattccaaacttgactgaatcatattcatcatctagagatccacctgagaagtcaattccattatgtactttaagatcattcccaaataaaattgatcatacaattgcttgggcaaaatctttattccaagattatttccatgattccccagaaaatgttaatttatacctttcacaaccaaattttgttgaaactgttttaaagcaaagtggtgatattaaaactattttagaatcaataaataattatttaacaactgataaaccatataattttgaagattgtatcaaatgggcaagattaaagtttgaagaaaaatttgctaatgatattaaacaattattatacaatttccctaaggatgcagttacatctaagggtgaacccttctggactagtccaaagagagctccaactccattggttttcgatattaatgacatcaatcattttgaatttgtttcaggtgctgctaacttattagcatttgtttatggattaaagggtgatcaaggtgctccaaataaagaatattatgctaatgttttaagtaagattgaaattccagcttggagtccaaagactgatttaaagattcaagttaatgacagtgatcctgatccaaatgctggcagtgctgttaatgataattctgttatagaaacattatcatcaacattaccatccccatcatcattagctggttatagattatcaactgttgagtttgaaaaagatgatgatagtaatcatcatattgaattcattaatgcagcatctaattgtcgtgcagaaaattatgaaattgaagttgcagataaatcaaagactaaattcattgcaggtaggattattcctgcaattgcaactacaactgcattagttactggtttagtttgtcttgaactttacaaagttgcagataataagactgatattgagaaatataagaatggttttgtcaatttggcattaccattctttggattttctgaaccagttgcaagtgctaagggtaaatatggtaataaagaatacgataagatctgggatagatttgatctttatggtgatatgacattgaatgatgtaattgaatattttaaaaagaatgaaggattagaattatcaatgatgtcatatggtgtttcacttttatttgcatcattttatgttaaaaagatggaaccaagatattctatgaagattactgaaattattgaattagttactaagaaaccactacctgcacatgaaaagaacttgattttagaagtctgtttagaggatgaaaatggcgaagaaccagacgttccttatgctgttcttcatttataatgacttgaataaaaaagtttattttaactaaaaaattgttaaataagtaaattagtatataagaaagttaaataatcaaaaataatataaaatttaatctaattgaatttaatcaaagatcacgacaccccaatctggactaacaaatctttgaacaccgtgaatcttgtataagttagagatttcttcaccatcagcatcttctaaatcaataattttcaagttagcttcaattctttcagggttaacactctttggtaagggaacaacttttctccatacttgccatgagatacaaatagcagcagttgaaacattatacttttcagcaatcttaattaattcatcagttttcaaaagtggagcaccaatcgaacctaatggagagtaagcttcaacgataataccattattttgacagaaatcgactaattcttgttgaggtaataatggatgtaattcaatttgtaaagcagctggaacaattttacattcatttataatttttttcattttaaaaacggtaaaattagaaacaccaatcgccttagttaaaccagattctaataatttttccattgatttataagtatcaacataactccattcactttcaggaataacatcacgagtaccatctggttttgaagggaatttatcatcattaccatttggattcattgtaactggccaatgcattaaatataaatcaacatagtcaacacctaatgatttaactgagttctctaatgattcggtcgatttcattgcacctgttgcccataatttggttgttaaaaagatttcttcacgtggaacacctgaatctttaattgctttaccaacaatatgttcattaccataaatatatgcggtatcaatgtgtctataaccgactttcaaagcggtgataactgcattgtatgcttcttcttcagttgatctccaggttccaaaaccaattgctggaattgttgcacctgtgtttaatttaaaagttggaacttcaatgtatttagccatatcaaaaattgtgatcagcttcaattatttaaaacaattgatagaaatacaaaatagattatatacaaatataccaaagtacaaaatgaaagtgggcttcaattgattgaatgggaattgatcattttatagaaggaaccaccatttcccagcaaggtctcataatcaccagattcggcaattttgcagttttcgataacaaagattacgtcagattttttcataatttgggcttgatgggtaatgcagatgatggtcttgttgaagtgtttcaattgtgataataattggatgacacgatcataggaatatgcatcaagtgaggcggtacattcatccattaagagaatgtttgatggacgtaataatgctcttgcaattgataatctctgtgcttgaccacctgaaacgagaacattaccagatttacataatggggcatcaagttgcttttctaatgattgtaccatctcgtttaatccaagtttatttaaaacatcccaaatatcatcatccgatacggaatgggccattggattaccgtatagtaaattttccttgattgtaccattgaaaaagtaatgtttctgtgtaacaacaccaaaattgttcataaaatgtgacattttgattgtttcaatatcataaccatcaattttaatttcttcactttctggatactgtccttctaaacttttatgttctctagataatgaatagagtcttaaaattaatgacatcacagttgatttaccacacccagattctccaacaattgaaattaattgattttttggaatatccatattgaaatctttcaaaactagtttgttagtatctgatggataagaaaatgaaacatttttgaatgatatacaatcatctgtttgtaaatttttgaaatttggagttaaatatccagaattattgccaacattatcatccaatttgaaaattagcatatctaatttcaatgcaactcttaaacctttatataaaccaggggctgatgacattaactctgacaaaaatgtgactgacattaaaatcatcataataatttgcatcatttgaaccaatgtatattcattatctgcaactaatttaaatccatagtataacataatagattgtgcaatattaaccaatataaatattatattagttgaaaatccaatagcaattgatcttcttaatccatcattcaaaactttatttaacttgatcgtgaatttttctctaaaatgatcttgaacatttaaacacataattgttttgataccaactctactctcataaataacagattctgcatcatttaatgaatccttatatgaaaattcagccttttgcatgattaaagtactgatgaaactaaaaattgcaaataatgggaacatactgaatccaactaatgcatatttccaacctgtaactaatgtccaaataatacaaacaatactaattgtaatacctgatactaatcttgctaaatttgatgaataaactttacggaaatctctgatatcattcattaacaaagttgaaagttcattagcattcaaatgttcaaaaaatggtatattttgattgagtattttaactaatgataatgattgtaaatttttactcaatctagctgatgcaaattctaaattagtagttgcgataaatgaaagtaaacccgtaagaatagcaatagctgtagcaatcattgaccatttgacttgatcaccatttgtaattaataatccatgatcttttggaattataccattgattaatttggagaaacagaatgaaaacactggtgtcaaaacagtttcacatacagtaacaaacaatccaaaaagatataataatttgtatttaattgataaagaacttattaataacttataagcaattaaaataggtgctctagtattacttaattgttctgaatcttcttccttttcatttaaaacatcaaagtattcatcctttgataatgattctttttctttaatttcttcaaaaatggatttcctattttgtttctttgtttctttgatattattgaattcactttcataatcaccttgattttcaagttgttgaaatttaccaccatttgcaattaaatcattcttcaaacctttctcaacaatttcaccatgttcaataaagaataccatatcatcacttctaatatgagataattcatgtgtaataataattgtagttttattttctctccatttataaattttatccatgaaaatttcacgttgttgaatatccaatgctgatatagattcatctaaaattaaaatacttgaatttcttaacttagccttaattaaatttaatctttgttcttcacctccactaaaatgaacatttttctcatttgcattacctttaccaagttttgtttgatatccatttggtgtattttcaataacattagttaaattgaagtattccacagcatctaaaacatcagatgtatcaatagtttcataatttgttccaagtaaaatattatttgcaattgtatcattgaaaattttaggaaattgttgaactaaagttatctgtgaacgtaaccatttagtatctaattcttgtaaatcataaccatcaattgaaattgaaccacttgatggattgtatagttttagtaagatatttgcaattgttgatttaccagaacctgatttaccaattaaataagtagttctaaaaggttcaatatgtaatgaaacattttttaaaattgttgaatctaaatctgaatctgtattttccttctctagattactagcattatcatcattatttttggtattatatttgaacactatattatcaagtttgatatcaccatataaattttcatccggaattaataaagttttattaaattcattaatttcttcatcagataataaaaattttacaacttttttgaaagaagtatttgccttttggaaaataacagcaataacagataaatgactaattgtcattgctagtttaagacatgaataaaatgatgaaataatatcacttggttgatcttgatttgttctaataagataagaaccaaaccaaaaactttgaacaaataataataaagctaaagttttcataactgaagaaacaatatttgcataaatagagaaatttctaaatgcaaattcacatttatctaataaatcattaaatttatgtaattctaaatcttttgaataaattattttaatccaagtgaaagaagtgaaattccaatctaaagttgaaatagcatttgaagtttgtttatcttcctcctctgaccatctttcaattttattaccgaagatgacaattgttaaaaaaatgattgggataactgacatgaacagtaaagttaatttccaagaataaaacatcgaaataattattaatgagatgattgagaagacacttttaaatagtattgataaatattcactaattgaacttctaaattcttctattgatctatttaattgaatcaaatcaccatctaagttagaattattttcaaaccaacttaaatttctagataataaagattcatataatttttctctacatctaatttgttgacgttcaccaagataagtgaaaagtgatgtttccatccaaccaaataaagttgtacctaaaccaattaaaattataccaaagcaaggccatttgatatcatgcataaaatcattcgagtttgtatattcacctatttgtaagtctgttaaatatttgaataatttattaatcataattgtggaagcaacatcagtaactgaacataatgcgttagtgataagagcaggaatgagtaaaatgaaatctttttttataaagaaatggaatgggtttttagttaccaagtcttcatcatcagtgttttgtagtttatcatccttttcattttcattttcaacagttgaattttctttcatagattgattaatttttgatttatcaaattcatacacagaagttggtgtattaataactgattcagttgattcaaaaacattatcaaattctttatctttggacatttgactgtactctgtttaatgatggaaataatatagtataatatgaaataataaattagaaaccaatttaaaacattgaaaactgataacaaacatgttcatatctctatatacttaaaataaaattttagatcaaaatatggctaatgaatatgaaacatagcaaaagagattaaaaaacatttgattaaagtgatatgaatcattacaaagtgtaatattgcctaattaggcaatatcaatggacaagtctaatacaatgatgaaaaaatccaatataaagcccagttagataactgatagagtgatatataagtaaaagggccatatactaaacattccaaccgataactgtcataaatacagctaataaatgaatatacactcaaaagaaagaaccaaccacaaaggcaattaaataaatcataaataaacatgtacagagcctccaaaaccttttaagaaaccctcactgagtggtaaattcgctccaaaatgcaatttcaccactataaatactaagcttatttcccctaggggttgtttcatctctgtaagtttgtgctttaattgacaagtggtgggttctgttgaattcactacttcaatagaggtatatggagtatactactctaactattattattactattattactattactacatttaatctaatttttaaacttctctaatacaacacataaatgatgaattatctagatagggacaactgaagcaaagcttttgcagagaaaagtcagcaaggtcttagtagaacttcttggtttctgatttgtgttgtatttatataatatactgtaatactttaacgtaataataccttattcagcctcccaaattacaaagtatgatgatggtgaatctgatgatcatgaatctctttattaagaaaaaaattattttcaccttgctagtgaccgttaaagtactttacttctttatctgataatattaacctttatacatgccttattcacttaattgatcaccactttattactttgctaccattatcgttcatcattattatatttaaataacactttatcgttctttaacccgctattagaattgttataaccgcaatggatcaaggctgggcattggtactacttacttcaatcattacatttctcggatgttgtgttatatataccgattcaatttatagtttattattccccaaaagagctgaaaggaaacctttccatattgcaaatgatacaaatttcttaatatgttcattatcattatcatctggttgtctattatttacttcattatacaaattattaccaagatctcattcttatttaaaattattacctcaattacattcaaataatcaattacttaaattaattgaatattctggctatattggtggtattgtattatgttcattacttaatttgattattcatctattaactaatgaaagtttagttcattgtgctcatgatggtgatcatggtcatggtgagagtcatgatcatggtcatagtcataatgataacaataatgataattctattactgaatctttatcacattcccattcacattccaataacaacttacttgatcattcaaatgaacattcatcagttacaggttccgattcttcaaataaaagtcaagataaatcagttaataatacatcataccccgtaactgattcagcttcaaattctccaccagatcataatcatcaaatacataataatactattattgatgaaaccgaaatacccccacctcaatcaaaacatgaaattcatacccaaacccatattaattatactcaaatgcattcaaataatccaattaatcaaccaaagaaatcactgtcattaattgatctgtctttgaaaactcttaaaggtgaaaaaatgacaggtaaatgttttggtgatattgattgttgtactgataatattataaatcaaaataaattacataaacataaatcaaatgaattatatttttgttcaagaccaactgaagaaaatttattatttttcccaaataaaaaacatatgataattgataaaaatgaattttcttcaagatacccaaatttagatattcattcaccattaattccaaatagtaataataataatacgaatatcacagactattattcaactaaaaatgatcatcaaatatcaaatttatcaatgaaatctaataatcatagtcataataattcacgccaatatcatgatcaaattgataatcattcacacaatgaaaatgatcacgacactgattatggaaatgatgattttgtgtcaattagtactcatgaaacagataatttacaagaacatcatcatcatattaaaactccattatcaagattattatcaattggtttacaaacaattttagcaattacattacataaattcccagagggatttataatgtattcaacatcaaagacgaatcctgaattaggtatgtcaattttcctttcaatgttcatacataattttgttgaaggtttcacaatgacattaccattatatgttgcattaaattcaagatttaaagcattattaattgcaggttcattaggttgtttaagtcaaccatttggtgcattgattggttattatatgtttcatgataaaattgatatggatgatccatttagtattttattaattgcaatattgttatcaattacatcaggatttttaacattcatttcattacaaatgtttgcaagtgcaatttcattcggtggtaaacaagaaactgtccttaaatggagttttattggtatatttttaatctgtgttagtaatatccttctatagtgtgtgtatgtataccgtattacgtaatgttttcttttttagataaatttaatgttacagaacaattgtcatttgtatattaatctaaagttaagtgcacatcacattgttatttttctcttaaattcaaggacaatatgggacaaaagacaagtaaattaagtaatgaagatataacgattttaagacaagagactaaattttctacacgtgaattacatcaatggtataaaggatttaagagggatattaataatggtgaattaacaaaggaagaatttattaaaattcataaacaattttatccatttggtgatccaactgaatttgcagcatatgcatttgaagcatttaatataaataacaaacaaagtattgattttaaagattttattaaatcattaagtattgcaacaagaggttcaattgaagaaaaattgaaatgggcatttaaaatgtatgatcgtgataatgatggttatatatcatatatggatttattaattgttgttaaatcagtttataaaatgattggcacaaaagttgtcaaattcgataattcaaatataacacctgaattaaaagccgataaaatttggattggttatcataaaaatttagataataaatcatttgaaaaaatttcaattgttgaattctctgatgcaaagaatttatcatcgaatgttataaatgctgttaatatttataatgatataatataatgtgagtactggtgataatttaaaggtaaagaaacggaaaaaaagcacagtaaatttaggtcataagtcattcattaaaaagtataatatctataaaaaaaacattgtattattattataaaaaaaaaaaacaacaaaatattatattatattctttcagcaagataaacagcagttttacaaacacctttaattgattcagttaaaagccaataaggtcttgcattttttgaatcattttgtacagcagtatctaaatgttctaattcttcatctctgaaaactttaattgtaccctttaaatgttgaatttcaattgaatcatcattttgaccattatttaaattttctatatctttaaaattatttgataaaactcttaattgttgattataatgtttaccaataactgtttcaacagcttctgtacaagccattgcagcttccttattcataaacccagttgcaaatcccataccaaaggcaccaattttccaaaatggtgttaaaattgatggtctaatacgatattgagtttgtaattcattaaaagttttacgatgatgaatttcttgttcccacatatgtttaataattggtttaacttttttattatgagataatgctaaatattgacctgcataaattaaatcagcacctaattcacctgcttgatcaactcttataactctatctaaataagctctctgagctggtgataattctttatgagttggtttattatcaattgggtttggaggaaggtaagatttcccaggacctttatatgtagaattgaatcttttaaatgaatgaaatgccaaacgagataccatttattgtttgtttaatgataaagacaaataatgattatacatcaaacactcccttaaataaaataaaataaaataaatcaaaattaataatatcaaaaatcatgttataatacgaaaatagaaatagctataaaccaccacaaaaaacatgtcgcgtcgataagccattatagacgcaacagattaccgaaagaggatgtgcggttaaatttccctgataagtgagaaacagtaagtggagattcctattgtttttaacatggaggagtcatcttaaaatctttgaatttatcaaatttatatttttcaattattattaaagtattggaaaggatggcatataatttggtttaagttcattataacaacttcttttcttaaattaacgtaaacagacaatcaataatggttaaggcaactatattaggagcagcgggtggaattggtcaaccattatcacttttattaagacttaataaaaaaattgatgaattatcattatatgatattgttaatacagttggagtttcagctgatttatcacatattccaactccacaattaattaaaggttatgttccaaaggataaaaatgataatgaaacaattaaaattgcattacaaggtagtgatattgttattatacctgcaggtataccaagaaaacctggtatgacaagggatgatttatttaaaattaatgcaggtattgttaaatcattaattcatcaagttggtattaattgtccaaatgcatttatttgtattatttcaaatcctgttaattcaactgtaccaattgcagttgaagaattgaaaaaattaggtgtttataatccaaagaaagttttcggtattacaactttagataatttaagattagaacaatttttatcagattccttaaataataaagtttcaacaactgatttatataatgatgttttaacaattggtggtcattcaggtgattcaattgtacctgttattaattcttggaataaaaattttaatgataatgaaagttatgataaattaattaatagagttcaatttggtggtgatgaagttgttaaagcaaaagatggtaaaggtagtgcaacattatctatggcaactgctgcatatagatttgttgataatttattagatgcaattaaatttaataaaataattaaagaagttgcatttgttaaaattgatgaattagaaacttttaaattaccatttttcattactaaacatactcaatatttcagtttaccaataacaattgatcaagaaggtattaaattagttgaattcccaggttatttaactgaaaaggaagttttaatgacaaaacatgcagttgaaaaagttaaagttgatgttaataaaggtttcaattttgttcatggttcaaaattataattataattataggtataatcttacttaatactgtatatctttatgatgaaaattgtattttttttgttgctgaataatgttcaaaactttgaagtgtagcttgtagggatatttgcttacgtaaacagatatttaaaattcatgtatacccttttgtcaggaatgatataaatatagaatataattacgtaagataaattacgtaagtaaatgatatattgatagtattaatatcataatataggtaacggggcaactcgttacatgagatatgtataagagggcaaattcccacaggatataatatgtgggaataactaatagttatgtagttcttcttatatagattcttatagagatatagagaaatcgtcctttagtagatcttattattagatattattacgtaagtcatacctagagagttaacaagtctaacaggttaaaagcagttctaaatatgacaagtaataattcagaggagaagatattcaaagatttattggaatcctggaaaggaaaaatattcgattctatcaaggagttgactgatgaaaaaaaatccaaataaatctgaaacagtagaatcatggtacaaacgagtcgagaaatttattcttgataatacaccatatgattcaacaggaggaattattattggtaaaattctaaaaaacaaggatatacaaaacttatacagtaaaggttataaaattgaaaaaattaaaattgttgatgattttgataaagaaattacaaaaaaaaatgtcaaatttaatatgatcaagttagctgaatataagttaagtgaagtgttatcaaaatttcaaattcatgataggtatgaatcagtagttaatacattggaaggaggaaaaaataatgagattgttaaaagagttactgatttatgggatagcgatatggaaatggaatactcacatgttggagtacttcataaattatatgttattaaacatgcaaaatctaatgaattatttgattcagatagccaattatttgatataattgattctttaagattcaaaaatattaaaaaaagaaagttagaaggagaagtttggttatttaaagacattcaagattgggtgactaatagatggaacaaatatattaatgctaccagaaaagagcaattgattcaaacagcagcatcaaaagagtagttacaagagagtttaatgaagcattaaaaaatgatacggagctaagtatgataaaagtcgtacaagaaataggaaaactttcaatccaaaacgaattaatgaaaaaaataattgatgttgaagaaaatgaaaacttttatgatggaaaatcagaagattttaagaaaaggagatacattgaaaataaagataagaaaaaacaactaacagcagatacattatcttatgaagaagccattgaaacttataactggttaccaagagatggaacggacttatatccagaactaccacaaggtgcatttaagtgtacaaaaaacttggaatattgcaaaaaatgtggaggtgaacataagcaagatctgcatatgtttgagaatggagaagtagtatggaaaaatatggaacataattttggaagaatgaaaaaactagactcacttagaagggaagaacttgataaatcaatttaaaaattgtaataacatcatattgaaaacatgatgaattttgctatacaaaaaacttgaaacaataagaggaaaatttgcatataaaataatctatacatttgcaataactgtatccaatgtatttatgtaggacctaaagtatttatcaaaaaaaaaaaaaaaaaaaaaaaaaaaatataatctaataaaactatatccgatatatataggatttcaattcaaacataactacgtccaatatagggtagctataaaaataaaaagagtccgatataggatttcaattgaatataattatgtccaatatagggtagttataaaacatttcaatcaaatataattatgtccaatatagggtaattataaaaccaaagtccgatataggatttcaaacaaatataaatatgtccaatataggattaaattataaaaaaataagtccgatataggatttcaatcaaatataactatgtccaatatagggtagttataaaaatagaaataaagaaagtccgatataggactgaaataaatttttataattaaatccaatatagggttattatattaattgctatcatataacaaattaatctaatataagattgaaagaaattcaaatgctaagcaaattgaaatttactgacatttttccaaccccccgagatgtcaggaatgatataaatatagaatataattacgtaagataaattacgtaagtaaatgatatattgatagtattaatatcataatataggtaacggggcaactcgttacatgagatatgtataagagggcaaattcccacaggatataatatgtgggaataactaatagttatgtagttcttcttatatagattcttatagagatatagagaaatcgtcctttagtagatcttattattagatattattacgtaagtcatacctagagagttaacaagtctaacaccttttcactttaaaatgttaatgagctgtcctattttctgttatcacttcactttcttgaactattataaataagtcaattgttatcctttaatttcagttgtttgtatcccaactttagttacctttgaattttttacaattttcatttatttattactttaaacaaacaaaaaagtaaagactataccttagtttttcattttataaattattcccacataagattactccaagaggctatgattgaaattgctcgttgcaatctacgaaattagagactcactataatgttgtgaaatttgctctttcattaaggataataaaattgaaataaataatgggtgaaaatcttttaaaacacccatagacaaattcaatttcagcgaacctattgtattaaatggctgaataggtctattaaattcgttattaaaaaaactatttagttaaaaatatcccgatttgatagttatactattctatcataaatcattaaatcaattcaaaccttatacattcttaagacaaattaaataataataattaccaatttcatcaataatgttacatttcacatcgaataaaaatactggagctagaactatctaatttgatattaatagagaatagaaggttatagaaaatgcgtaaactgtaactattaatttaatgcaaaaagaaattaaactaagcaaaaaatattctatttttaaatgccgagagttgcgtcttttcggtttttgaattaattgttttaagatcccatttggagactaaaatttaatccagcttgtattgccgatcctaatagagaaaaaaaaaagaaaaagaaacgatatactatgaaaaacaatccccccaatttattatcctaatattaatgacgacaccattacttattgtaatcagacaacacgttttgaaaacttgaaacagttaaaactccgtaacaattaaaataaagtagttttgtaacattgctacaaggatacggagaccgatctttaagatattatcgatatagtgtccataatatttattatcgaaaaaattttcttgacaaaattgatggcaagttaatacaaaattatttattttaaaaatattacatgaaaatgaataacagtttcgtttcattgaatatcctcgaataaaatttgtaacccctccctcttgttattattcattgcgatttattgtgataagtttaattggtggtgttatctattgagtcctcaatatatgcacctggattgctctattttagagtttacgtttcaaaccgtttaaggttttgaataattataatttatagtaataaatttataaaccttaattatacaaatgtttcatttttttaaacattaattaattaactaataaattaattgtaatatcctgtaaatggtacatattcaatatttctatcatttccattattaatttcaatatttttacccattgaattgatcatattaggttgcattggaattggactcattggtcccatattcattggtatctgcatacccatttgaattggtatttgatttatttgtgtaggattcatttgcattgacatttgattcatttgtgtagggttcatttgtattggcatttgattcattggtcccatttgcattggcatttgcatatgattcattggtcccatttgcattggtatttgtcccatttgcatatgattcattggtgtcatttgtactatatgtcccatcatttgtggaggttgttgttgttgttgctgtgaataattcatatactgaggcggcggtggtccttgtatttgtattggaccttgtaattgttgcatttgaccctgtggtggttgtaattgtccatgtaattgccctggatgatacattggattattctgtccttgtaaattttgcctggtacgtggtgaattgtcattagtagtattgatattgatattattattattattgttattattattattgtttttattaacagtaatgtttttaacatgtggtgattgatgtggtgtcatattaaatgacattctattattttcagttgatttaggtcttggtaatggtattttattattatttggacttttctgtactttgggtgatttaaaagcagttgaaacaacatcagtattaattcttggatttgaaactggtgttggtaatctagttattggaaatttagtattatcatcaacattattattattatcattattatctcttatatacatattaattggcaaagttgatggtaatttgataacagggtatagtttattaaacttttctctttttgtttcatcaatatctaaaactttaagtggtacttcctttacatcatttactaaactatcaagtgtaatattctttctaaatggtatagtattgttgtttagattacttttaaaatcaatattattaaattgataaactctttcatcagtattcatcataatcaaatcaattatgattggatcattcaaactatgcaatgggaattcattttttgtttcattatcattatcattactatttttcctactatcaatatcttttttgatatttcttttattgttcttgatatcatcatccttattatcatcctcattattattattattattattactattttcaattccatccttttcatcatctaaagctttaataaaatcatttaagtttttcgagaatgattcatttggacatttatcatataactgttttgataaatttttgataattggtaagtaacttggattaattaattttctacttgaaacttgttaaactatcaaatgataatgtaaaattatcagtataataataagcataagataataataaaaaaggtaaaaaatcatccaactgatgcattaatatattcgaaaaaattcatttgatttagtataataaggatcataatgataagatttagtgtaaaaaatttatagctaagcctggattaaagaatgaatgatcaactaataataggaaaatatgaatgaaataataaaattgtttgattatctgggaaaagtgattgaaaaatttcacaaatccaaattgcatttaaataattacctgatttcttaaatgaaactattaaatgaattgataaattagttattaaattaattgttaaatcatcatttggttttggtaatgataaaactgaacctaattcatttctagcagattctaaatctccatcatcaattgctaattgaactaattctaaatgaatatttcttgcaattttataaaatttaaattatttaaatcttttggtaataaatataatgaatttgtaaaagcattaattgagtctctttgtaaattcatttttttcaaacatttacctaatattagccatacatttaggattattttgatcagatttccattaaactaattataatttcatgagatttttcaagttcatttatgagtagataataatcagctaattttgtatttaattcaaaatcatttttcaaatttgggtacttattaattgattttatgataaaattaattgtattttgaataccaatgtaattttgtttaattaaatcattttgtattaataattcaaccaataaattcattatagaattattcattgggaaataatttaatgccatttggaagcatttaattgcagtaggatgaatttgaattcaatgataatgctaaattaccacatttaacccaagttgaaaagaataactcatcagatagtagaggtttattatttatattatttatatcatttatatcattctctattattattattgaagaagattttgaatttgttgattgatggctatgagtatgactgtgaatattgttattactgctattgctctgtattgaaggtttatgtcgtttattagatggtgaagaatatattgatttattattgttactctgtgaagaatttgaatttaaaattgaagaatttgaatttgaagaatatgaaattgatttattcatttcagttgaatgtgggatatcattagtcttaaagaatttttcctcttcttagtaccaccatgtcgagtcattattgtagaactagaattataactagaatagtgaaaagtgaataatagtttccaaaagctgtaagcaaattggaaggtaaaaatgtgatatatcgatatgtcaataacaatcactgataatctacagaaaaagaaaggaaaaggcaaaaagagacaataaaaaatgacaataaatgacaatgaatgaaaataaataaaataagcccagttgcagattaaaaaagaaaatgaaaatttcaatcaccggaacctgaattaagatcggtgaactacaattatgggtcttaaatttaattagtgttgtttatgcagggaagtattgtatttctattttaatgtaacattatataatataatataatattatcttattcactagaacttaccatttatcaagtttttaatcatatccttaccagttaaataaactgtctttgctaaattatggaaatctaatgttgatgaaaatgtatctaaaaatccaaatggtaacatagctggaatccaaccttgtgctaattctaatgcaaatgatccacctggcattgaatattgtttaatattacccttagctaaatgatgaacatcacctggtaaataaacagatttttcaaattgatgtgcaaatgatgcccattgttgaccttttaaaattgtaaaataatcatcagcaaaatgaatacctgaatgtccctctgtaccaactgatgatccgaaaataattaaatattcagaaattgatgcatgtaaaataatcatttgacccattgctccacctgcattattgaaaacccaatcttccttattaactttattaataatttcactaccatatttttcttccaatttttcttgtaatgcttcaaagaatggatatgcatcatcatttgatgtagttgctaatgtttccttaacaataatttgtaattcatccttatcgaaaacataattctttggtaaccatgtataaaataaagtatccattacatagaaaatcatataaagtaatccaactactttaagaattgacattaaggaacatttcttactacaacataacatcttgtattagtttttgatacttggttgttgaataagatagaacaactgaaatacactaaaataaagaaaaagaatagtattgttgataatatattagtaaacatttcgaattttgaaaaaaaaatggaaatgaaaatattgcggaacgagctatacgaattgttgtatacgagtattaatctactttttataccacttccttatcattgtttttatgatataactttcttacttcatatataggtataatggataccgctgatgaatacgacaaagtatacgacaaagttaataaggaaataaccatcgattacagtaaaaactctaatgattcacttataatcgttatattaaatatttgcaaattcattaactataatgaaataaattcacttgttaaagacgataaaatattgagtacattgcttcaaatatacaacaataatgattattcattgatcaataagaatatagatataacaaagataccatcatggaaagacagagtggatataaacttactaatactccttttcaaatgtgaaaatgttaaaaataatcatttcatcaatagtactatacgagagaggataaatattgaaaattggataaacaaagtaaatattgaaattaatgaattatctaaatctacaacttattttaaagtactaaattatttgaaattcaatttacaattattattattagagtatttgaaatttgaaaataataattcattgtacttaaatttaatatttgaattattcaatactggtcataaaaatttactgattgatcaaaaaatttatgctttttttataaaatcgttccttttggaaccttatggatatttcaaaaaatcaataatcaaaacattcattgattctcatcaatttgaacttctcaacttactatgtgatgatacactccttgattatgataaaatacgaaatgaagcgataaagctagtatcctttagtgaagatgagctaagtacggttaaattaaatatcattcaactgaatataatttatatctctaacgtttacaaaactataagatttgataaattgtttgaactcttggatatatcaagtaatgatgaaaaagatttaattattgatgaaatacttaaattaaaacttaatgggaaattaattgtcaaaataaatcaagttgacgaaatactctatttccccttaaatgatacaaatttgaaatcagatttaaatgaaatgtttacgactacattaccacaggttttagaacgtgattgggatgtattgatgaataattagcatttcttttcgtttttttattttttttatttttttgttttgtttcattaattaattatatagattattaaaattataaatgtacgggtattcaaagaaaagtaaataaatatcaaaccttaactctaccaactaacatatctgcaacttcccttacttcatcccagaatataatctttctcattctaccttctttatgagtttcatgatcccaaattttagaaactggtgtaaataaaacattgttcttttgaatacctaaaactgcagctgttgaatcagcttctggtgatctaataaattcaccaatttcattttcagctttagaaatattatcaaaattagattccataaattcaattgccttaattgctaatcttgttgctctagttctatcaattggtgatggaataccaccttgttgaacatgacctggaattgcagttcttgaatcaaatctaccattagattcagaactaattatatctccaataacatcagttgttaatgctttacttgctaattctgatttaattaaaattctacctgatttatttctaccattatcattatggaaattaatctttaatgtttgaatatctaaattcaattgttttaaatcaataccttcttcaggcacatatgaacattctgcacctgcacatagttgtgcatatgttgcaatataaccacaattaccaccttgaacttcaacaacaaaacatctatttctagttgcacttgcactttgactaattatatcacaatattcaactaattgatttaaacatgtatctgaacctaatgaatattcagtacctggaacattattagaaattgttgcaggaattaaaaccattggaattcttaatcctggataacttgatctagaattttctaattgatgtaatgattctaatgcttcaaaaccaccaacaattaataaaccatcaattttatatttagttaaataatatgaaattaatccaatatctgtctctaatggagtatccctatttgtaccaatttcagatccacctaatgaattccaattttcaatttctaaccagtcaagtgatctaattgattcatgtcttgataatccagaaaatccattataaattgcataaggtgtatgacctcttgataaacaataatttgcaaatgcataagttgcagaattcataccaccagctggtgctccaacatttataattgcaaaatttttatgattttcacttgataatgaaggatctttgaaatctgcactattaattgctttaaaatatttcagatgttcactaaattcagtatctcttaattccataactttatcaaaatcttttgcattaattgcttcggcaacagattttgttaatttaactgcatcaactaagtttctcttaataattttattttcagaaataccaatcattggagatggtgtgtctggattaccatttaaaactgcatcaactgcataaacaccttgcattgtagctaaatatctatcaaatgcaactgcaggtccaccacgttgaacatgacctaaagttgtaactcttgtatctaaacctaatttttcaactaaaatatccttaacatcattacaactaattggatttaaactagaatcaattgcaccttcagcaacaataacgattgtctttctcttacctctctctctgtgtttggaaataactttacacatatgttcactccattcactttgtttacttggagattcaggaatgaaaatataatcagcacttgttgcaataccagccattaatgctaaccaaccacaatgtctacccataacttcaataacaaaggcacgttgatgagaattagcagttgcatcaatataatcaattgctttacaaattctatcaagtgaagaataagaaccaattgtaacatcagttgaggacatatcattatcaatcgagccaactgtaccacaaatatttaaaaattgatgtttatcaaattgatcttgagtaattttaccagtgtctaataattctttaattaaagaaggccattcagctctaaataaatcagcaccagttaatgaaccatcaccaccacaaacaattaatgcagttatacctgcattaatcatattatgacatgcagttaatctaccatctctttccttaaattccatacatcttgcagtaccgatattagtaccaccatcagataaccatccattaacatcagaccaatgaatttcctttataaaatcaccaccattaactaaacctgaataaccttcatgaatgacgtaagctttacaatttttatgaattgcagtacgaataattgcacggacattagcattcataccgggagcatcaccaccggatgtcatgactgcgatacattgttgaacatcattagttgcagtattagtattatttgcagttgcaattgatgaaccgattgaaaggttatgagattctgtatgtgaatgtgaatgatgctttctttcctttacagcaaatgggtttgctaatttagagaaaccaataattgaacccaatggatcgattgcataaacttccaatggattattcagtggtttttgttgaaattgaacattattagcagttaaaattgattcaatttcctttaaattttcaacattaaatgtaattgcgctttgataagttctccaatctcttttattaatatgtttaattaaattttcagtattagtcttaatttcttcaattgaagctgaattttctggatcaattaataatgaaattgaagttttattgtttgataaaatacattgatcatttgtttcttcatagctttggaaaaacaatgatttgtaaaacttctttgtaagttcatataattctttattaggcgcataaaatagaaccatttttatttagttatataaagcagaatacacaatatatcaagaaagaaacaaacctctacaaaagaaacaaacattcagttatatttatttaaactctctaatatcaatccaggactccatgacaggcatcacgttgtaaataaaatttcgcgaagttcggatcacatgttggaacactactgtccgtggtggtttcaacggggtgttctctgcatctgtaccctgtagcactgatgatgggtgtagtgtagctggtcctgctgctgtagagtatgtgcaagtggttatatctgataatactcccttatgggggaaaagacctcgacagagactcttcataatcgatatagtcttatcattagtattcatgtgagatgatttttcaccatttcggactacatcaccattaatcgtaccataataaagacccatagtacgacatattctctgtaattgtttcctaacatctcttgcacgtctcattgatctagcatcaacccaatgatcatggcaccattgattggagtatccacttgcattgtatccttcccataatgctagtaatgctaatgggtcacccccagctttataagtattagcaaattgacgttgtgcagccttagcagcagttttattagtagtatctttcttggggtttataaagggggattcatcgaaaagagagacaattgcaataacttcatcgactacaccgttttcggatgcagctaaaatagttcttcctatcattggggttaatggtaatgcagataacttaattccaatagttgttaattgtcccttactattgagtgcacccagtgcataaagtagtgataatgaacgggcaagacctttagctgatggtcgatccatgaatgggaatgtcataatatttgtaatattcattgataaaagtgataaaacaatacttgttaattcagatcttaaaatttcaggtgttggtgaaactgccatctcattgtatgattccttagtgtataatctaaaacatttacctggttgaactctaccagctctaccagctctttgatctgctgatgccttagaacatgatgcaacaactaaactatcactatcattcgatggatcatatttcttttgtttaaccataccactatcaataacgaaaacaataccgtcaattgttaatgaggtttcagctatattagttgatgcaacaactttacggttgtttgttttctcaaacactaatttttgctgatcaggttgaagacttgcatataatggcaatacatcaagagtatcgatttcagataatgcttcacaaaataattctatttcttcctgtcctgttaaaaaaactaaaatatcacccttagcaccactaccatgaatctgtaacacactagcaattgcagcctttaaataactagcctcgggatgtatagtataataaatatcaacagggaatcgacgacccttcacagtgacaattggtgcattattgaaaaataagctaaacttttcagcatctaatgttgcagatgatataacaattttcaaatctttacgtttggatattaattcctttaacaatccaagtaaaatatcagtatgaatagttctttcatgtgcttcatcaaccattatgacaccatatttacttaaatttaaatctcccatcatttctctaactaacataccatcagttgaatattttaaaactgttctcttactacttcgttcatcaaatctaacactgtaaccaaccttatcaccaactttcgtacccatctcatctgcaacacgcgcagcaacactcattgctgccactcgacgtggttgtgtacaacaaactcgtccatatccatcttcaactatatattgtggtaattgtgtagttttacctgaacctgtttcaccaactaagataataacttgattttccttgatcatttccataacccaggttctttcttcataaattggtaatttttgtttcgtatcaatcaaatcgaactctttttgttcagctatatctattagttcactgatttcagtcatttcaactaatttttcatcttcaccaaactcaatatggtctccaccatcaaaagtatagatttcatcatccttttcttcatcaacatcaacttttttcacacgagcacgtttgagctgcgtctctgtccaatcatcaggttgttgacggatttcgcccatcaatggttcaacttatttggataaaaaagaaacattcaagttgtgcttaatgtattaattctttgtaagctgcgccgcatctttatattttccagccatcctacatgacacatgatggcaatgctttaatatcgataagactcctgatgacagtcctcaatctatctttaaacaatccattcttcacatgtctgaatacataccaccatggtcatcaccttatattattggaatagcgggattgagtggatcaggtaaaacaacagttgcacaagaaattataaagtcaattaacgaaccatggacaattttactatcacttgataatttttataaagaacttacacctgaattgagtgcaaaggcattcaataatgaatatgattttgatcatccagatgcaattgatttagatctcatttatgaatgtgttaaatcaattaaaaatgggaaaaagacagaaataccaatgtattcatttagtaaccatcaacgaataaaagatcaatcaattacaatatatggtgcaaacgttattataattgaaggtatttttacattatttaaaaaggaattgttagatttaatggattgtaaggttttcgttgatactgatattgatatttgttattctcgtaggttattaagagatattgttcatagaggtagagatatcaaaagtgttatcgaacaatgggatgcattcgttaaacctaacgctattttatatgtcttaccaacaagatcaaatgcagatatagttattccacgtggatcggataactatatagctttagaattacttattgaacatttaaagaatcaattaaatattaaatcaactgaacatattaatcatttaaaaatgttgggattgaaaattaatccaatcaattgggataatgttacaataattgaggaaaccaatcaagttaaagttattaaaacaatattacttaataaagaaactaagaatgatattttctcattttattttgatagaattgcatcaattttgattaatgaatcattaaattttgtcagatatgtttcaggagattctataggtaaaaccattgaaacacctataaatgttaaaattaatccaacagatgcatttttccaattgaatgaaataattgcagtttcaatcataagatccggtgattgttttataaaatccttaagaagaactataccagctgctaaaattggtaaacttttaattcaaacagattcaagaactggtgaacctcaattacacactgaaaaattaccaataataactacgaactcacaagtacttcttttcgatgcacagacaatatcgggagcagcatcaataatggcaattaaaattttattagatcataatgttgacgaaaataatattattttagttaattatacaactactgaattagctataaagagaattttccatgcatttccaaaaattaaaattgttactgcctgtgttggtggtcatggtagcaccgattcggataatgattggtggatgtgtcatagatttatcgataatatttactatggaaccaattaattctaagaaaaaacaaaataaaaacgctttataactgaaaaaaaaaactgtattgattataatctatatatccttcaaatcacataccaattaatcttaaacataagtaaccaactgtaataacaacaagtccacaaccgatactcgcaggaacaccgatcttgatgaatgtaccgacatttaaatatttttcaccaacgttattagttaatccaattgctgtaacattagggaacccagatgtaggtaaacccattgcacatgaacagataagtgcagtacagaaaactaaaatatttggatgtggatctggtaatgatttaccaatttcagcaactaatgggataataatcaatgctgcaactgtatgagagacaaaagttgccataattaacacgatcaatccgaaaactgataaaattgtaaataattcagattcttcaagttgaacttgaataagttttgcaattgttgctaataaaccagaaactgaaactgctttacctaaagccataccacccattgcaagaataacaattgtccacggataattattaaaatcttcttgtgataatgagcctgtaacatagaatgtaaccattgataataatgcaatttgacccatatcaccaaaccaaggttctaaaactgatgcaagacaccataaaacaattgttgtgattgaaattagaataacaacatattgtttaatttgtaaaattatctgaatgttgattaattggtacaattgtaatatctttaaatgagaatgaaaataataaaataataaagatgattaccaaacaacaaatacaaacaggaacagaaactgcaaaaccactgtaaccaattaggttcaggatccataaattgtaaagcgacaacattttgtggtgatgcaattggtgatgccatacctgcaactgaagatgctaatgcaatacctaaaactaatgcttgtgcaaattgattcttaactgttttaccattaactgttgtatcatttaacgtgtttaaaattggttggacgacagaatacattaaaacgggtgctgcaacattagagacaaaagctgcaacaattgttgagacaaccataattgagaataatataggtgcaggttcttgtttaacttttgaaagta
